(19) United States
(12) Patent Application Publication
(10) Pub. No.: US 2002/0090673 A1
(43) Pub. Date: Jul. 11, 2002

(54) Nucleic acids, proteins, and antibodies

(76) Inventors: Craig A. Rosen, Laytonsville, MD (US); Steven M. Ruben, Olney, MD (US); Steven C. Barash, Rockville, MD (US)

Correspondence Address: HUMAN GENOME SCIENCES INC, 9410 KEY WEST AVENUE, ROCKVILLE, MD, 20850

(21) Appl. No.: 09/764,898

(22) Filed: Jan. 17, 2001

Related U.S. Application Data
(60) Provisional application No. 60/179,065, filed on Jan. 31, 2000.
(60) Provisional application No. 60/180,628, filed on Feb. 4, 2000.
(60) Provisional application No. 60/214,886, filed on Jun. 28, 2000.
(60) Provisional application No. 60/217,487, filed on Jul. 11, 2000.
(60) Provisional application No. 60/225,758, filed on Aug. 14, 2000.
(60) Provisional application No. 60/220,963, filed on Jul. 26, 2000.
(60) Provisional application No. 60/217,496, filed on Jul. 11, 2000.
(60) Provisional application No. 60/225,447, filed on Aug. 14, 2000.
(60) Provisional application No. 60/218,290, filed on Jul. 14, 2000.
(60) Provisional application No. 60/225,757, filed on Aug. 14, 2000.
(60) Provisional application No. 60/226,868, filed on Aug. 22, 2000.
(60) Provisional application No. 60/216,647, filed on Jul. 7, 2000.
(60) Provisional application No. 60/225,267, filed on Aug. 14, 2000.
(60) Provisional application No. 60/216,880, filed on Jul. 7, 2000.
(60) Provisional application No. 60/225,270, filed on Aug. 14, 2000.
(60) Provisional application No. 60/251,869, filed on Dec. 8, 2000.
(60) Provisional application No. 60/235,834, filed on Sep. 27, 2000.
(60) Provisional application No. 60/234,274, filed on Sep. 21, 2000.
(60) Provisional application No. 60/234,223, filed on Sep. 21, 2000.
(60) Provisional application No. 60/228,924, filed on Aug. 30, 2000.
(60) Provisional application No. 60/224,518, filed on Aug. 14, 2000.
(60) Provisional application No. 60/236,369, filed on Sep. 29, 2000.
(60) Provisional application No. 60/224,519, filed on Aug. 14, 2000.
(60) Provisional application No. 60/220,964, filed on Jul. 26, 2000.
(60) Provisional application No. 60/241,809, filed on Oct. 20, 2000.
(60) Provisional application No. 60/249,299, filed on Nov. 17, 2000.
(60) Provisional application No. 60/236,327, filed on Sep. 29, 2000.
(60) Provisional application No. 60/241,785, filed on Oct. 20, 2000.
(60) Provisional application No. 60/244,617, filed on Nov. 1, 2000.
(60) Provisional application No. 60/225,268, filed on Aug. 14, 2000.
(60) Provisional application No. 60/236,368, filed on Sep. 29, 2000.
(60) Provisional application No. 60/251,856, filed on Dec. 8, 2000.
(60) Provisional application No. 60/251,868, filed on Dec. 8, 2000.
(60) Provisional application No. 60/229,344, filed on Sep. 1, 2000.
(60) Provisional application No. 60/234,997, filed on Sep. 25, 2000.
(60) Provisional application No. 60/229,343, filed on Sep. 1, 2000.
(60) Provisional application No. 60/229,345, filed on Sep. 1, 2000.
(60) Provisional application No. 60/229,287, filed on Sep. 1, 2000.
(60) Provisional application No. 60/229,513, filed on Sep. 5, 2000.
(60) Provisional application No. 60/231,413, filed on Sep. 8, 2000.
(60) Provisional application No. 60/229,509, filed on Sep. 5, 2000.
(60) Provisional application No. 60/236,367, filed on Sep. 29, 2000.
(60) Provisional application No. 60/237,039, filed on Oct. 2, 2000.
(60) Provisional application No. 60/237,038, filed on Oct. 2, 2000.
(60) Provisional application No. 60/236,370, filed on Sep. 29, 2000.
(60) Provisional application No. 60/236,802, filed on Oct. 2, 2000.
(60) Provisional application No. 60/237,037, filed on Oct. 2, 2000.
(60) Provisional application No. 60/237,040, filed on Oct. 2, 2000.
(60) Provisional application No. 60/240,960, filed on Oct. 20, 2000.
(60) Provisional application No. 60/239,935, filed on Oct. 13, 2000.

(51) Int. Cl. C12Q 1/68; C07H 21/04; C12P 21/02; C12N 5/06; C12N 15/74

(52) U.S. Cl. 435/69.1; 435/325; 435/320.1; 435/6; 536/23.1

(57) ABSTRACT

The present invention relates to novel proteins. More specifically, isolated nucleic acid molecules are provided encoding novel polypeptides. Novel polypeptides and antibodies that bind to these polypeptides are provided. Also provided are vectors, host cells, and recombinant and synthetic methods for producing human polynucleotides and/or polypeptides, and antibodies. The invention further relates to diagnostic and therapeutic methods useful for diagnosing, treating, preventing and/or prognosing disorders related to these novel polypeptides. The invention further relates to screening methods for identifying agonists and antagonists of polynucleotides and polypeptides of the invention. The present invention further relates to methods and/or compositions for inhibiting or enhancing the production and function of the polypeptides of the present invention.

### STATEMENT UNDER 37 C.F.R. § 1.77(b)(4)

[0001] This application refers to a “Sequence Listing” listed below, which is provided as an electronic document on two identical compact discs (CD-R), labeled “Copy 1” and “Copy 2.” These compact discs each contain the following files, which are hereby incorporated in their entirety herein:

| | | | Date of |
|---|---|---|---|
| Document | File Name | Size in bytes | Creation |
| Sequence Listing | PJZ01_seqList.txt | 622,670 | 01/15/2001 |
| V Viewer Setup File | SetupDLL.exe | 695,808 | 12/19/2000 |
| V Viewer Help File | v.cnt | 7,984 | 01/05/2001 |
| Controller | | | |
| V Viewer Program | v.exe | 753,664 | 12/19/2000 |
| File | | | |
| V Viewer Help File | v.hlp | 447,766 | 01/05/2001 |

[0002] The Sequence Listing may be viewed on an IBM-PC machine running the MS-Windows operating system by using the V viewer software, licensed by HGS, Inc., included on the compact discs (see World Wide Web URL: http://www.fileviewer.com).

### FIELD OF THE INVENTION

[0003] The present invention relates to novel proteins. More specifically, isolated nucleic acid molecules are provided encoding novel polypeptides. Novel polypeptides and antibodies that bind to these polypeptides are provided. Also provided are vectors, host cells, and recombinant and synthetic methods for producing human polynucleotides and/or polypeptides, and antibodies. The invention further relates to diagnostic and therapeutic methods useful for diagnosing, treating, preventing and/or prognosing disorders related to these novel polypeptides. The invention further relates to screening methods for identifying agonists and antagonists of polynucleotides and polypeptides of the invention. The present invention further relates to methods and/or compositions for inhibiting or enhancing the production and function of the polypeptides of the present invention.

### BACKGROUND OF THE INVENTION

[0004] Blood is composed of a fluid component, plasma, in which are suspended red and white blood cells and platelets. This suspension, circulating through the cardiovascular system, forms the basis of the immune system, provides all of the body's tissues with oxygen and nutrients, and removes carbon dioxide and other metabolic byproducts for excretion.

[0005] Immune cells, red blood cells, and platelets, are derived from common precursor stem cells by a process known as hematopoiesis. During fetal life hematopoiesis occurs in the liver and spleen, but in the adult, hematopoiesis occurs mainly in bone marrow. The stem cells from which all blood cells are derived proliferate and differentiate into the various blood cell lineages, (e.g., lymphocytes (B or T cells), myeloid cells (basophils, eosinophils, neutrophils, mast cells, macrophages), platelets, or red blood cells) in response to signals received from other cells (e.g., stromal cells) in the bone marrow microenvironment and also from cytokines. Many of the cytokines that promote the growth and differentiation of hematopoietic stem cells are known as “colony stimulating factors”. For example, interleukin-3 (IL-3, and also known as multi-colony stimulating factor) and granulocyte macrophage colony stimulationg factor (GM-CSF), which are released by activated macrophages T cells, stimulate the production of macrophages and granulocytes (myelopoiesis). Stem cell factor (SCF, c-kit ligand) is a growth factor for primitive lymphoid and myeloid hematopoietic bone marrow progenitor cells expressing the early cell surface marker CD34. Other hematopoeitic cytokines/growth factors include, but are not limited to macrophage colony stimulating factor (M-CSF) and granulocyte colony stimulating factor (G-CSF). Interleukins-1, 6, and 7 have also been shown to function as hematopoietic growth factors/cytokines. Deficiencies in the quantities of mature red and white blood cells, either as a result of insufficient production or excessive destruction, may result in anemias and/or immunodeficiencies.

[0006] In addition to the cellular component of the blood, there are a remarkable variety of soluble blood-borne proteins that subserve important physiological functions. Descriptions of some of the functional classes of blood proteins, along with representative members of these classes, are given below.

[0007] Coagulation Factors

[0008] The formation of insoluble protein aggregates at the site of vascular injury or inflammation, termed coagulation, is the result of multiple interacting coagulation factors (Dahlback, B., Lancet 355:1627-32). This cascade of interdependent proteins (including Factors V, VIII, IX, X XI, XII) results in the production of the protease, thrombin. Thrombin converts blood-soluble fibrinogen into fibrin, which polymerizes into insoluble clots which are stabilized by the activity of Factor XIII. This process is balanced by the activity of coagulation inhibitors such as antithrombin III, heparin cofactor II, Protein C and Protein S. Imbalance between pro-clotting factors and coagulation inhibitors leads to potentially serious medical conditions, including improper wound healing and the bleeding disorders hemophilia A and B, as well as excessive clotting disorders such as thrombosis (e.g. cerebral, coronary, and placental), pulmonary embolus, stroke, and coronary artery disease. For a more extensive review see Triplett, D., Clin Chem 46:1260-9.

[0009] Immunoproteins

[0010] Blood plasma contains a number of proteins which contribute to the immune response. Immunoglobulin antibodies are glycoproteins with similar structural domains, which bind to specific antigenic invaders and trigger other components of the immune system. The complement cascade, a network of about 20 interacting proteins, is activated by antigen-antibody complexes and results in the lysis of infected cells, as well as other important immune functions. Immunoproteins are important tools for the diagnosis and treatment of infection, cancer, and other disorders. For more detailed discussion of immunoproteins see Meri, J. and Jarva, H., Vox Sang 74 suppl. 2:291-302 and Chapter 23 of Molecular Biology of the Cell, 3^{rd} Edition, edited by Alberts, B. et al.

[0011] Hormones

[0012] The blood serves as a major vehicle for hormones and other secreted signaling molecules which act at a site distant to their release. A number of peptide hormones function as regulators of homeostatic processes. For example, parathyroid hormone and calcitonin oppositely regulate serum levels of calcium. Blood-borne peptide hormones which regulate carbohydrate metabolism include insulin, glucagon, and adrenocorticotropin hormone. Vasopressin, angiotensin, and bradykinin are hormones which modulate vasodilation and blood pressure. Follicle-stimulating hormone and leutinizing hormone play important roles in both male and female reproductive functions. Dysfunction of these hormones can lead to a wide spectrum of disorders, including osteoporosis, diabetes, psychiatric disoreders, hypoglycemia, obesity, infertility, as well as hypo- and hypertension.

[0013] Cytokines

[0014] Cytokines are a class of circulating proteins which act primarily as intercellular signaling molecules regulating hematopoiesis, angiogenesis, and immune system functions. One subgroup of cytokines, the hematopoietins, regulate hematopoietic stem cell differentiation to maintain the proper number and proportions of each blood cell type. For example, the production of erythrocytes is stimulated by the release of erythropoietin from the kidneys in response to decreased blood oxygen levels. Similarly, thrombopoietin stimulates the proliferation and differentiation of megakaryocytes, leading to increased platelet production. Another cytokine subgroup, the chemokines, are secreted by cells of the immune system, and act to coordinate the immune response to an invading antigen. This is a large and diverse class of proteins, and includes RANTES, eotaxin, lymphotactin, MIP-1, and the interleukins. Many of these polypeptides have uses in the diagnosis and treatment of immunological disorders and infection (Holldack. J. et al., Med Ped Oncol Suppl 2:2-9; Chapter 23, Immunology, edited by Elgert, K.).

[0015] Carrier Proteins

[0016] A number of soluble proteins found in blood function as carriers of other molecules such as nutrients and waste products. Carrier proteins can also bind exogenously delivered drugs and influence pharmacokinetic properties such as serum half-life and tissue adsorption. Serum albumin, comprising about half of the protein found in blood plasma, regulates osmotic pressure of blood, as well as binds many bioactive molecules. Transferrin is a blood carrier protein that regulates iron levels, while ceruloplasmin regulates copper levels.

[0017] The discovery of new human blood-related polynucleotides, the polypeptides encoded by them, and antibodies that immunospecifically bind these polypeptides, satisfies a need in the art by providing new compositions which are useful in the diagnosis, treatment, prevention and/or prognosis of disorders of the blood and/or blood forming organs, such as, for example, hemophilia, anemia, leukemia, immunodeficiency disorders (including AIDS), cardiovascular disease, stroke, metabolic disorders, and infectious or parasitic diseases.

### SUMMARY OF THE INVENTION

[0018] The present invention relates to novel proteins. More specifically, isolated nucleic acid molecules are provided encoding novel polypeptides. Novel polypeptides and antibodies that bind to these polypeptides are provided. Also provided are vectors, host cells, and recombinant and synthetic methods for producing human polynucleotides and/or polypeptides, and antibodies. The invention further relates to diagnostic and therapeutic methods useful for diagnosing, treating, preventing and/or prognosing disorders related to these novel polypeptides. The invention further relates to screening methods for identifying agonists and antagonists of polynucleotides and polypeptides of the invention. The present invention further relates to methods and/or compositions for inhibiting or enhancing the production and function of the polypeptides of the present invention.

### DETAILED DESCRIPTION

[0019] Tables

[0020] Table IA summarizes some of the polynucleotides encompassed by the invention (including cDNA clones related to the sequences (Clone ID NO:Z), contig sequences (contig identifier (Contig ID:) and contig nucleotide sequence identifier (SEQ ID NO:X)) and further summarizes certain characteristics of these polynucleotides and the polypeptides encoded thereby. The first column provides the gene number in the application for each clone identifier. The second column provides a unique clone identifier, “Clone ID NO:Z”, for a cDNA clone related to each contig sequence disclosed in Table 1A. The third column provides a unique contig identifier, “Contig ID:” for each of the contig sequences disclosed in Table 1A. The fourth column provides the sequence identifier, “SEQ ID NO:X”, for each of the contig sequences disclosed in Table 1A. The fifth column, “ORF (From-To)”, provides the location (i.e., nucleotide position numbers) within the polynucleotide sequence of SEQ ID NO:X that delineate the preferred open reading frame (ORF) that encodes the amino acid sequence shown in the sequence listing and referenced in Table 1A as SEQ ID NO:Y (column 6). Column 7 lists residues comprising predicted epitopes contained in the polypeptides encoded by each of the preferred ORFs (SEQ ID NO:Y). Identification of potential immunogenic regions was performed according to the method of Jameson and Wolf (CABIOS, 4; 181-186 (1988)); specifically, the Genetics Computer Group (GCG) implementation of this algorithm, embodied in the program PEPTIDESTRUCTURE (Wisconsin Package v10.0, Genetics Computer Group (GCG), Madison, Wis.). This method returns a measure of the probability that a given residue is found on the surface of the protein. Regions where the antigenic index score is greater than 0.9 over at least 6 amino acids are indicated in Table 1A as “Predicted Epitopes”. In particular embodiments, polypeptides of the invention comprise, or alternatively consist of, one, two, three, four, five or more of the predicted epitopes described in Table 1A. It will be appreciated that depending on the analytical criteria used to predict antigenic determinants, the exact address of the determinant may vary slightly. Column 8, “Tissue Distribution” shows the expression profile of tissue, cells, and/or cell line libraries which express the polynucleotides of the invention. The first number in column 8 (preceding the colon), represents the tissue/cell source identifier code corresponding to the key provided in Table 4. Expression of these polynucleotides was not observed in the other tissues and/or cell libraries tested. For those identifier codes in which the first two letters are not “AR”, the second number in column 8 (following the colon), represents the number of times a sequence corresponding to the reference polynucleotide sequence (e.g., SEQ ID NO:X) was identified in the tissue/cell source. Those tissue/cell source identifier codes in which the first two letters are “AR” designate information generated using DNA array technology. Utilizing this technology, cDNAs were amplified by PCR and then transferred, in duplicate, onto the array. Gene expression was assayed through hybridization of first strand CDNA probes to the DNA array. CDNA probes were generated from total RNA extracted from a variety of different tissues and cell lines. Probe synthesis was performed in the presence of ³³P dCTP, using oligo(dT) to prime reverse transcription. After hybridization, high stringency washing conditions were employed to remove non-specific hybrids from the array. The remaining signal, emanating from each gene target, was measured using a Phosphorimager. Gene expression was reported as Phosphor Stimulating Luminescence (PSL) which reflects the level of phosphor signal generated from the probe hybridized to each of the gene targets represented on the array. A local background signal subtraction was performed before the total signal generated from each array was used to normalize gene expression between the different hybridizations. The value presented after “[array code]:” represents the mean of the duplicate values, following background subtraction and probe normalization. One of skill in the art could routinely use this information to identify normal and/or diseased tissue(s) which show a predominant expression pattern of the corresponding polynucleotide of the invention or to identify polynucleotides which show predominant and/or specific tissue and/or cell expression. Column 9 provides the chromosomal location of polynucleotides corresponding to SEQ ID NO:X. Chromosomal location was determined by finding exact matches to EST and CDNA sequences contained in the NCBI (National Center for Biotechnology Information) UniGene database. Given a presumptive chromosomal location, disease locus association was determined by comparison with the Morbid Map, derived from Online Mendelian Inheritance in Man (Online Mendelian Inheritance in Man, OMIM™. McKusick-Nathans Institute for Genetic Medicine, Johns Hopkins University (Baltimore, Md.) and National Center for Biotechnology Information, National Library of Medicine (Bethesda, Md.) 2000. World Wide Web URL: http://www.ncbi.nlm.nih.gov/omim/). If the putative chromosomal location of the Query overlaps with the chromosomal location of a Morbid Map entry, an OMIM identification number is disclosed in column 10 labeled “OMIM Disease Reference(s)”. A key to the OMIM reference identification numbers is provided in Table 5.

[0021] Table 1B summarizes additional polynucleotides encompassed by the invention (including cDNA clones related to the sequences (Clone ID NO:Z), contig sequences (contig identifier (Contig ID:) contig nucleotide sequence identifiers (SEQ ID NO:X)), and genomic sequences (SEQ ID NO:B). The first column provides a unique clone identifier, “Clone ID NO:Z”, for a cDNA clone related to each contig sequence. The second column provides the sequence identifier, “SEQ ID NO:X”, for each contig sequence. The third column provides a unique contig identifier, “Contig ID:” for each contig sequence. The fourth column, provides a BAC identifier “BAC ID NO:A” for the BAC clone referenced in the corresponding row of the table. The fifth column provides the nucleotide sequence identifier, “SEQ ID NO:B” for a fragment of the BAC clone identified in column four of the corresponding row of the table. The sixth column, “Exon From-To”, provides the location (i.e., nucleotide position numbers) within the polynucleotide sequence of SEQ ID NO:B which delineate certain polynucleotides of the invention that are also exemplary members of polynucleotide sequences that encode polypeptides of the invention (e.g., polypeptides containing amino acid sequences encoded by the polynucleotide sequences delineated in column six, and fragments and variants thereof).

[0022] Table 2 summarizes homology and features of some of the polypeptides of the invention. The first column provides a unique clone identifier, “Clone ID NO:Z”, corresponding to a cDNA clone disclosed in Table 1A. The second column provides the unique contig identifier, “Contig ID:” corresponding to contigs in Table 1A and allowing for correlation with the information in Table 1A. The third column provides the sequence identifier, “SEQ ID NO:X”, for the contig polynucleotide sequence. The fourth column provides the analysis method by which the homology/identity disclosed in the Table was determined. Comparisons were made between polypeptides encoded by the polynucleotides of the invention and either a non-redundant protein database (herein referred to as “NR”), or a database of protein families (herein referred to as “PFAM”) as further described below. The fifth column provides a description of the PFAM/NR hit having a significant match to a polypeptide of the invention. Column six provides the accession number of the PFAM/NR hit disclosed in the fifth column. Column seven, “Score/Percent Identity”, provides a quality score or the percent identity, of the hit disclosed in columns five and six. Columns 8 and 9, “NT From” and “NT To” respectively, delineate the polynucleotides in “SEQ ID NO:X” that encode a polypeptide having a significant match to the PFAM/NR database as disclosed in the fifth and sixth columns. In specific embodiments polypeptides of the invention comprise, or alternatively consist of, an amino acid sequence encoded by a polynucleotide in SEQ ID NO:X as delineated in columns 8 and 9, or fragments or variants thereof.

[0023] Table 3 provides polynucleotide sequences that may be disclaimed according to certain embodiments of the invention. The first column provides a unique clone identifier, “Clone ID”, for a cDNA clone related to contig sequences disclosed in Table 1A. The second column provides the sequence identifier, “SEQ ID NO:X”, for contig sequences disclosed in Table 1A. The third column provides the unique contig identifier, “Contig ID:”, for contigs disclosed in Table 1A. The fourth column provides a unique integer ‘a’ where ‘a’ is any integer between 1 and the final nucleotide minus 15 of SEQ ID NO:X, and the fifth column provides a unique integer ‘b’ where ‘b’ is any integer between 15 and the final nucleotide of SEQ ID NO:X, where both a and b correspond to the positions of nucleotide residues shown in SEQ ID NO:X, and where b is greater than or equal to a +14. For each of the polynucleotides shown as SEQ ID NO:X, the uniquely defined integers can be substituted into the general formula of a−b, and used to describe polynucleotides which may be preferably excluded from the invention. In certain embodiments, preferably excluded from the invention are at least one, two, three, four, five, ten, or more of the polynucleotide sequence(s) having the accession number(s) disclosed in the sixth column of this Table (including for example, published sequence in connection with a particular BAC clone). In further embodiments, preferably excluded from the invention are the specific polynucleotide sequence(s) contained in the clones corresponding to at least one, two, three, four, five, ten, or more of the available material having the accession numbers identified in the sixth column of this Table (including for example, the actual sequence contained in an identified BAC clone).

[0024] Table 4 provides a key to the tissue/cell source identifier code disclosed in Table 1A, column 8. Column 1 provides the tissue/cell source identifier code disclosed in Table 1A, Column 8. Columns 2-5 provide a description of the tissue or cell source. Codes corresponding to diseased tissues are indicated in column 6 with the word “disease”. The use of the word “disease” in column 6 is non-limiting. The tissue or cell source may be specific (e.g. a neoplasm), or may be disease-associated (e.g., a tissue sample from a normal portion of a diseased organ). Furthermore, tissues and/or cells lacking the “disease” designation may still be derived from sources directly or indirectly involved in a disease state or disorder, and therefore may have a further utility in that disease state or disorder. In numerous cases where the tissue/cell source is a library, column 7 identifies the vector used to generate the library.

[0025] Table 5 provides a key to the OMIM reference identification numbers disclosed in Table 1A, column 10. OMIM reference identification numbers (Column 1) were derived from Online Mendelian Inheritance in Man (Online Mendelian Inheritance in Man, OMIM. McKusick-Nathans Institute for Genetic Medicine, Johns Hopkins University (Baltimore, Md.) and National Center for Biotechnology Information, National Library of Medicine, (Bethesda, Md.) 2000. World Wide Web URL: http://www.ncbi.nlm.nih.gov/omim/). Column 2 provides diseases associated with the cytologic band disclosed in Table 1A, column 9, as determined using the Morbid Map database.

[0026] Table 6 summarizes ATCC Deposits, Deposit dates, and ATCC designation numbers of deposits made with the ATCC in connection with the present application. 1211 Table 7 shows the cDNA libraries sequenced, and ATCC designation numbers and vector information relating to these cDNA libraries.

[0027] Table 8 provides a physical characterization of clones encompassed by the invention. The first column provides the unique clone identifier, “Clone ID NO:Z”, for certain cDNA clones of the invention, as described in Table IA. The second column provides the size of the cDNA insert contained in the corresponding cDNA clone.

[0028] Definitions

[0029] The following definitions are provided to facilitate understanding of certain terms used throughout this specification.

[0030] In the present invention, “isolated” refers to material removed from its original environment (e.g., the natural environment if it is naturally occurring), and thus is altered “by the hand of man” from its natural state. For example, an isolated polynucleotide could be part of a vector or a composition of matter, or could be contained within a cell, and still be “isolated” because that vector, composition of matter, or particular cell is not the original environment of the polynucleotide. The term “isolated” does not refer to genomic or cDNA libraries, whole cell total or mRNA preparations, genomic DNA preparations (including those separated by electrophoresis and transferred onto blots), sheared whole cell genomic DNA preparations or other compositions where the art demonstrates no distinguishing features of the polynucleotide/sequences of the present invention.

[0031] As used herein, a “polynucleotide” refers to a molecule having a nucleic acid sequence encoding SEQ ID NO:Y or a fragment or variant thereof; a nucleic acid sequence contained in SEQ ID NO:X (as described in column 3 of Table 1A) or the complement thereof; a cDNA sequence contained in Clone ID NO:Z (as described in column 2 of Table 1A and contained within a library deposited with the ATCC); a nucleotide sequence encoding the polypeptide encoded by a nucleotide sequence in SEQ ID NO:B as defined in column 6 of Table 1B or a fragment or variant thereof; or a nucleotide coding sequence in SEQ ID NO:B as defined in column 6 of Table 1B or the complement thereof. For example, the polynucleotide can contain the nucleotide sequence of the full length cDNA sequence, including the 5′ and 3′ untranslated sequences, the coding region, as well as fragments, epitopes, domains, and variants of the nucleic acid sequence. Moreover, as used herein, a “polypeptide” refers to a molecule having an amino acid sequence encoded by a polynucleotide of the invention as broadly defined (obviously excluding poly-Phenylalanine or poly-Lysine peptide sequences which result from translation of a polyA tail of a sequence corresponding to a cDNA).

[0032] In the present invention, “SEQ ID NO:X” was often generated by overlapping sequences contained in multiple clones (contig analysis). A representative clone containing all or most of the sequence for SEQ ID NO:X is deposited at Human Genome Sciences, Inc. (HGS) in a catalogued and archived library. As shown, for example, in column 2 of Table 1A, each clone is identified by a cDNA Clone ID (identifier generally referred to herein as Clone ID NO:Z). Each Clone ID is unique to an individual clone and the Clone ID is all the information needed to retrieve a given clone from the HGS library. Furthermore, certain clones disclosed in this application have been deposited with the ATCC on Oct. 5, 2000, having the ATCC designation numbers PTA 2574 and PTA 2575; and on Jan. 5, 2001, having the depositor reference numbers TS-1, TS-2, AC-1, and AC-2. In addition to the individual cDNA clone deposits, most of the cDNA. libraries from which the clones were derived were deposited at the American Type Culture Collection (hereinafter “ATCC”). Table 7 provides a list of the deposited cDNA libraries. One can use the Clone ID NO:Z to determine the library source by reference to Tables 6 and 7. Table 7 lists the deposited cDNA libraries by name and links each library to an ATCC Deposit. Library names contain four characters, for example, “HTWE.” The name of a cDNA clone (Clone ID) isolated from that library begins with the same four characters, for example “HTWEP07”. As mentioned below, Table 1A correlates the Clone ID names with SEQ ID NO:X. Thus, starting with an SEQ ID NO:X, one can use Tables 1, 6 and 7 to determine the corresponding Clone ID, which library it came from and which ATCC deposit the library is contained in. Furthermore, it is possible to retrieve a given cDNA clone from the source library by techniques known in the art and described elsewhere herein. The ATCC is located at 10801 University Boulevard, Manassas, Va. 20110-2209, USA. The ATCC deposits were made pursuant to the terms of the Budapest Treaty on the international recognition of the deposit of microorganisms for the purposes of patent procedure.

[0033] In specific embodiments, the polynucleotides of the invention are at least 15, at least 30, at least 50, at least 100, at least 125, at least 500, or at least 1000 continuous nucleotides but are less than or equal to 300 kb, 200 kb, 100 kb, 50 kb, 15 kb, 10 kb, 7.5 kb, 5 kb, 2.5 kb, 2.0 kb, or 1 kb, in length. In a further embodiment, polynucleotides of the invention comprise a portion of the coding sequences, as disclosed herein, but do not comprise all or a portion of any intron. In another embodiment, the polynucleotides comprising coding sequences do not contain coding sequences of a genomic flanking gene (i.e., 5′ or 3′ to the gene of interest in the genome). In other embodiments, the polynucleotides of the invention do not contain the coding sequence of more than 1000, 500, 250, 100, 50, 25, 20, 15, 10, 5, 4, 3, 2, or 1 genomic flanking gene(s).

[0034] A “polynucleotide” of the present invention also includes those polynucleotides capable of hybridizing, under stringent hybridization conditions, to sequences contained in SEQ ID NO:X, or the complement thereof (e.g., the complement of any one, two, three, four, or more of the polynucleotide fragments described herein), the polynucleotide sequence delineated in columns 8 and 9 of Table 2 or the complement thereof, and/or cDNA sequences contained in Clone ID NO:Z (e.g., the complement of any one, two, three, four, or more of the polynucleotide fragments, or the cDNA clone within the pool of cDNA clones deposited with the ATCC, described herein), and/or the polynucleotide sequence delineated in column 6 of Table 1B or the complement thereof. “Stringent hybridization conditions” refers to an overnight incubation at 42 degree C in a solution comprising 50% formamide, 5× SSC (750 mM NaCl, 75 mM trisodium citrate), 50 mM sodium phosphate (pH 7.6), 5× Denhardt's solution, 10% dextran sulfate, and 20 μg/ml denatured, sheared salmon sperm DNA, followed by washing the filters in 0.1 × SSC at about 65 degree C.

[0035] Also contemplated are nucleic acid molecules that hybridize to the polynucleotides of the present invention at lower stringency hybridization conditions. Changes in the stringency of hybridization and signal detection are primarily accomplished through the manipulation of formamide concentration (lower percentages of formamide result in lowered stringency); salt conditions, or temperature. For example, lower stringency conditions include an overnight incubation at 37 degree C in a solution comprising 6× SSPE (20× SSPE=3M NaCl; 0.2M NaH₂PO₄; 0.02M EDTA, pH 7.4), 0.5% SDS, 30% formamide, 100 ug/ml salmon sperm blocking DNA; followed by washes at 50 degree C with 1× SSPE, 0.1% SDS. In addition, to achieve even lower stringency, washes performed following stringent hybridization can be done at higher salt concentrations (e.g. 5× SSC).

[0036] Note that variations in the above conditions may be accomplished through the inclusion and/or substitution of alternate blocking reagents used to suppress background in hybridization experiments. Typical blocking reagents include Denhardt's reagent, BLOTTO, heparin, denatured salmon sperm DNA, and commercially available proprietary formulations. The inclusion of specific blocking reagents may require modification of the hybridization conditions described above, due to problems with compatibility.

[0037] Of course, a polynucleotide which hybridizes only to polyA+ sequences (such as any 3′ terminal polyA+ tract of a cDNA shown in the sequence listing), or to a complementary stretch of T (or U) residues, would not be included in the definition of “polynucleotide,” since such a polynucleotide would hybridize to any nucleic acid molecule containing a poly (A) stretch or the complement thereof (e.g., practically any double-stranded cDNA clone generated using oligo dT as a primer).

[0038] The polynucleotide of the present invention can be composed of any polyribonucleotide or polydeoxribonucleotide, which may be unmodified RNA or DNA or modified RNA or DNA. For example, polynucleotides can be composed of single- and double-stranded DNA, DNA that is a mixture of single- and double-stranded regions, single- and double-stranded RNA, and RNA that is mixture of single- and double-stranded regions, hybrid molecules comprising DNA and RNA that may be single-stranded or, more typically, double-stranded or a mixture of single- and double-stranded regions. In addition, the polynucleotide can be composed of triple-stranded regions comprising RNA or DNA or both RNA and DNA. A polynucleotide may also contain one or more modified bases or DNA or RNA backbones modified for stability or for other reasons. “Modified” bases include, for example, tritylated bases and unusual bases such as inosine. A variety of modifications can be made to DNA and RNA; thus, “polynucleotide” embraces chemically, enzymatically, or metabolically modified forms.

[0039] The polypeptide of the present invention can be composed of amino acids joined to each other by peptide bonds or modified peptide bonds, i.e., peptide isosteres, and may contain amino acids other than the 20 gene-encoded amino acids. The polypeptides may be modified by either natural processes, such as posttranslational processing, or by chemical modification techniques which are well known in the art. Such modifications are well described in basic texts and in more detailed monographs, as well as in a voluminous research literature. Modifications can occur anywhere in a polypeptide, including the peptide backbone, the amino acid side-chains and the amino or carboxyl termini. It will be appreciated that the same type of modification may be present in the same or varying degrees at several sites in a given polypeptide. Also, a given polypeptide may contain many types of modifications. Polypeptides may be branched, for example, as a result of ubiquitination, and they may be cyclic, with or without branching. Cyclic, branched, and branched cyclic polypeptides may result from posttranslation natural processes or may be made by synthetic methods. Modifications include acetylation, acylation, ADP-ribosylation, amidation, covalent attachment of flavin, covalent attachment of a heme moiety, covalent attachment of a nucleotide or nucleotide derivative, covalent attachment of a lipid or lipid derivative, covalent attachment of phosphotidylinositol, cross-linking, cyclization, disulfide bond formation, demethylation, formation of covalent cross-links, formation of cysteine, formation of pyroglutamate, formylation, gamma-carboxylation, glycosylation, GPI anchor formation, hydroxylation, iodination, methylation, myristoylation, oxidation, pegylation, proteolytic processing, phosphorylation, prenylation, racemization, selenoylation, sulfation, transfer-RNA mediated addition of amino acids to proteins such as arginylation, and ubiquitination. (See, for instance, PROTEINS—STRUCTURE AND MOLECULAR PROPERTIES, 2nd Ed., T. E. Creighton, W. H. Freeman and Company, New York (1993); POSTTRANSLATIONAL COVALENT MODIFICATION OF PROTEINS, B. C. Johnson, Ed., Academic Press, New York, pgs. 1-12 (1983); Seifter et al., Meth. Enzymol. 182:626-646 (1990); Rattan et al., Ann. N.Y. Acad. Sci. 663:48-62 (1992)).

[0040] “SEQ ID NO:X” refers to a polynucleotide sequence described, for example, in Tables 1A or 2, while “SEQ ID NO:Y” refers to a polypeptide sequence described in column 6 of Table 1A. SEQ ID NO:X is identified by an integer specified in column 4 of Table 1A. The polypeptide sequence SEQ ID NO:Y is a translated open reading frame (ORF) encoded by polynucleotide SEQ ID NO:X. “Clone ID NO:Z” refers to a cDNA clone described in column 2 of Table 1A.

[0041] “A polypeptide having functional activity” refers to a polypeptide capable of displaying one or more known functional activities associated with a full-length (complete) protein. Such functional activities include, but are not limited to, biological activity, antigenicity [ability to bind (or compete with a polypeptide for binding) to an anti-polypeptide antibody], immunogenicity (ability to generate antibody which binds to a specific polypeptide of the invention), ability to form multimers with polypeptides of the invention, and ability to bind to a receptor or ligand for a polypeptide.

[0042] The polypeptides of the invention can be assayed for functional activity (e.g. biological activity) using or routinely modifying assays known in the art, as well as assays described herein. Specifically, one of skill in the art may routinely assay blood and blood-forming organ associated polyp eptides (including fragments and variants) of the invention for activity using assays as described in Examples 21, 22, 23, 24, 25, 29, 33 and 43.

[0043] “A polypeptide having biological activity” refers to a polypeptide exhibiting activity similar to, but not necessarily identical to, an activity of a polypeptide of the present invention, including mature forms, as measured in a particular biological assay, with or without dose dependency. In the case where dose dependency does exist, it need not be identical to that of the polypeptide, but rather substantially similar to the dose-dependence in a given activity as compared to the polypeptide of the present invention (i.e., the candidate polypeptide will exhibit greater activity or not more than about 25-fold less and, preferably, not more than about tenfold less activity, and most preferably, not more than about three-fold less activity relative to the polypeptide of the present invention).

[0044] Table 1A summarizes some of the polynucleotides encompassed by the invention (including contig sequences (SEQ ID NO:X) and clones (Clone ID NO:Z) and further summarizes certain characteristics of these polynucleotides and the polypeptides encoded thereby.

[0045] Polynucleotides and Polypeptides of the Invention

TABLE 1A

| | | | | | | | | | |
|---|---|---|---|---|---|---|---|---|---|
| | | | | | AA | | Tissue Distribution | | |
| | | | | | SEQ | | Library code: count | | OMIM |
| Gene | Clone ID | Contig | SEQ ID | ORF | ID | | (see Table IV for | Cytologic | Disease |
| No: | NO: Z | ID: | NO: X | (From-To) | NO: Y | Predicted Epitopes | Library Codes) | Band | Reference(s): |

| | | | | | | | |
|---|---|---|---|---|---|---|---|
| 1 | HPLBY29 | 1041126 | 11 | 461-3 | 155 | Arg-19 to Phe-27, | AR061: 1, AR089: 0 |
| | | | | | | Ala-41 to Arg-48, | H0030: 2, H0057: 1 |
| | | | | | | Pro-70 to Thr-76, | and L0754: 1. |
| | | | | | | Glu-80 to Leu-85, | |
| | | | | | | Asn-94 to Pro-104, | |
| | | | | | | Asn-120 to Ala-127. | |
| | | 509875 | 85 | 461-3 | 229 | Arg-19 to Phe-27, | |
| | | | | | | Ala-41 to Arg-48, | |
| | | | | | | Pro-70 to Thr-76, | |
| | | | | | | Glu-80 to Leu-85, | |
| | | | | | | Asn-94 to Pro-104, | |
| | | | | | | Asn-120 to Ala-127. | |
| 2 | HOUEU57 | 1102662 | 12 | 436-254 | 156 | | AR089: 2, AR061: 2 |
| | | | | | | | S0040: 1 and S0044: 1. |
| | | 531182 | 86 | 45-182 | 230 | Pro-1 to Glu-13, | |
| | | | | | | Arg-26 to Glu-31. | |
| | | 531182 | 86 | 45-182 | 230 | Pro-1 to Glu-13, | |
| | | | | | | Arg-26 to Glu-31. | |
| 3 | HNHFR39 | 1151373 | 13 | 414-767 | 157 | Glu-1 to Ile-8, | AR061: 7, AR089: 6 |
| | | | | | | Ser-49 to Ser-54. | S0053: 2, H0052: 1 and |
| | | | | | | | S0216: 1. |
| | | 576399 | 87 | 201-308 | 231 | | |
| 4 | HFATE17 | 1151475 | 14 | 483-268 | 158 | | AR061: 6, AR089: 2 |
| | | | | | | | L0749: 8, L0493: 2, |
| | | | | | | | L0605: 2, S0300: 1 and |
| | | | | | | | L0362: 1. |
| | | 662491 | 88 | 335-586 | 232 | Pro-11 to Gly-20. | |
| 5 | HNGER43 | 699391 | 15 | 97-204 | 159 | | AR061: 3, AR089: 2 |
| | | | | | | | S0052: 3 |
| 6 | HWAAE95 | 1135294 | 16 | 700-1269 | 160 | Thr-16 to Gly-22, | AR089: 9, AR061: 2 |
| | | | | | | Pro-34 to Ser-46, | H0255: 1, H0318: 1, |
| | | | | | | Arg-79 to Gly-100, | H0581: 1 and S0250: 1. |
| | | | | | | Gln-116 to Val-123, | |
| | | | | | | Leu-153 to Ser-161. | |
| | | 789051 | 89 | 3-224 | 233 | Trp-2 to Gly-10, | |
| | | | | | | Phe-23 to Arg-36. | |
| 7 | HMSGL27 | 638097 | 17 | 213-527 | 161 | Ser-96 to Ala-102. | AR051: 35, AR054: |
| | | | | | | | 29, AR089: 24, AR050: |
| | | | | | | | 20, AR061: 7 |
| | | | | | | | S0002: 1, L0766: 1 and |
| | | | | | | | H0445: 1. |
| | | 855759 | 90 | 318-127 | 234 | Cys-8 to Gly-28, | |
| | | | | | | Pro-31 to Glu-36. | |
| 8 | HKIXB77 | 1161224 | 18 | 560-276 | 162 | His-1 to Ser-6, | AR089: 38, AR061: 10 |
| | | | | | | Ala-74 to Thr-80. | L0750: 3, S0360: 2, |
| | | | | | | | H0441: 2, H0553: 2, |
| | | | | | | | L0776: 2, L0659: 2, |
| | | | | | | | L0744: 2, L0747: 2, |
| | | | | | | | H0542: 2, S0110: 1, |
| | | | | | | | S0400: 1, H0255: 1, |
| | | | | | | | H0645: 1, H0392: 1, |
| | | | | | | | H0333: 1, H0013: 1, |
| | | | | | | | H0156: 1, H0122: 1, |
| | | | | | | | H0052: 1, H0105: 1, |
| | | | | | | | H0014: 1, S0051: 1, |
| | | | | | | | H0687: 1, H0124: 1, |
| | | | | | | | H0135: 1, H0087: 1, |
| | | | | | | | H0264: 1, H0647: 1, |
| | | | | | | | L0631: 1, L0638: 1, |
| | | | | | | | L0641: 1, L0774: 1, |
| | | | | | | | L0775: 1, H0547: 1, |
| | | | | | | | H0539: 1, S0380: 1, |
| | | | | | | | S0332: 1, L0743: 1, |
| | | | | | | | L0749: 1, L0777: 1, |
| | | | | | | | S0192: 1 and H0506: 1. |
| | | 870018 | 91 | 165-443 | 235 | | |
| 9 | HTNBM01 | 1207944 | 19 | 3-1661 | 163 | Asn-23 to Thr-28, | AR050: 206, AR054: |
| | | | | | | Arg-120 to Leu-126, | 89, AR051: 72, AR061: |
| | | | | | | Thr-160 to Leu-167, | 2, AR089: 1 |
| | | | | | | Pro-195 to Val-204, | H0591: 1, T0067: 1, |
| | | | | | | His-206 to Gly-215, | S0038: 1 and L0485: 1. |
| | | | | | | Phe-246 to Gly-251, | |
| | | | | | | Pro-267 to Gln-275, | |
| | | | | | | Thr-303 to Glu-311, | |
| | | | | | | Thr-373 to His-392. | |
| | | 910705 | 92 | 1-420 | 236 | Gly-1 to Gln-8, | |
| | | | | | | Thr-36 to Glu-44. | |
| 10 | HBJGT92 | 1193035 | 20 | 1864-1427 | 164 | Gln-49 to Gln-54, | AR089: 1, AR061: 1 |
| | | | | | | Pro-69 to Thr-74, | H0318: 2, L0517: 2 |
| | | | | | | Glu-99 to Arg-105, | and L0748: 1. |
| | | | | | | Gln-108 to Asn-114. | |
| | | 919507 | 93 | 275-490 | 237 | Lys-7 to Ser-18, | |
| | | | | | | Pro-32 to Glu-51. | |
| 11 | HAGAT56 | 1218696 | 21 | 381-1097 | 165 | Lys-35 to Asn-46. | AR061: 2, AR089: 1 |
| | | | | | | | S0010: 2, S0430: 1, |
| | | | | | | | H0657: 1, S0222: 1, |
| | | | | | | | S0003: 1, H0040: 1, |
| | | | | | | | H0494: 1, S0126: 1, |
| | | | | | | | S0436: 1 and L0366: 1. |
| | | 924588 | 94 | 3-665 | 238 | Lys-18 to Glu-30, | |
| | | | | | | Ile-33 to Glu-38, | |
| | | | | | | Asp-46 to Asp-55, | |
| | | | | | | Ser-67 to Glu-76, | |
| | | | | | | Glu-84 to Arg-94. | |
| 12 | HCFMG57 | 1205913 | 22 | 1837-1598 | 166 | Glu-41 to Arg-47, | AR089: 1, AR061: 0 |
| | | | | | | Asp-72 to Asp-79. | H0218: 7, L0766: 5, |
| | | | | | | | L0761: 3, L0655: 3, |
| | | | | | | | H0547: 3, L0740: 3, |
| | | | | | | | H0656: 2, S0360: 2, |
| | | | | | | | H0486: 2, H0434: 2, |
| | | | | | | | H0553: 2, S0036: 2, |
| | | | | | | | H0135: 2, L0637: 2, |
| | | | | | | | L0805: 2, L0636: 2, |
| | | | | | | | L0664: 2, H0555: 2, |
| | | | | | | | L0439: 2, L0745: 2, |
| | | | | | | | L0747: 2, L0596: 2, |
| | | | | | | | L0581: 2, H0669: 1, |
| | | | | | | | H0663: 1, H0619: 1, |
| | | | | | | | H0369: 1, S0222: 1, |
| | | | | | | | H0587: 1, H0194: 1, |
| | | | | | | | H0046: 1, H0050: 1, |
| | | | | | | | L0471: 1, S0051: 1, |
| | | | | | | | H0239: 1, S0250: 1, |
| | | | | | | | S0003: 1, H0090: 1, |
| | | | | | | | H0038: 1, S0002: 1, |
| | | | | | | | L0520: 1, L0638: 1, |
| | | | | | | | L0646: 1, L0662: 1, |
| | | | | | | | L0768: 1, L0803: 1, |
| | | | | | | | L0775: 1, L0776: 1, |
| | | | | | | | L0519: 1, L0789: 1, |
| | | | | | | | L0663: 1, L0665: 1, |
| | | | | | | | S0126: 1, H0658: 1, |
| | | | | | | | H0660: 1, H0672: 1, |
| | | | | | | | H0696: 1, L0750: 1, |
| | | | | | | | L0779: 1, L0731: 1, |
| | | | | | | | L0366: 1 and H0423: 1. |
| | | 929803 | 95 | 571-792 | 239 | Asn-10 to Leu-15, | |
| | | | | | | Leu-20 to Tyr-27, | |
| | | | | | | Thr-39 to Lys-44. | |
| 13 | HTEHS55 | 1195572 | 23 | 327-121 | 167 | Leu-1 to Arg-15, | AR061: 9, AR089: 5 |
| | | | | | | Pro-22 to Pro-32. | H0616: 4, L0803: 3, |
| | | | | | | | H0555: 3, H0038: 2, |
| | | | | | | | L0809: 2, L0439: 2, |
| | | | | | | | L0759: 2, L0005: 1, |
| | | | | | | | S0049: 1, H0569: 1, |
| | | | | | | | S0050: 1, L0163: 1, |
| | | | | | | | S0003: 1, L0771: 1, |
| | | | | | | | L0649: 1, L0804: 1, |
| | | | | | | | L0774: 1, L0775: 1, |
| | | | | | | | L0784: 1, L0659: 1, |
| | | | | | | | L0788: 1, L0664: 1, |
| | | | | | | | L0438: 1, H0648: 1, |
| | | | | | | | S0330: 1, L0602: 1, |
| | | | | | | | L0744: 1, L0748: 1, |
| | | | | | | | L0745: 1, L0747: 1, |
| | | | | | | | L0749: 1, L0752: 1, |
| | | | | | | | L0758: 1, L0608: 1, |
| | | | | | | | S0196: 1 and S0412: 1. |
| | | 933264 | 96 | 228-401 | 240 | Ser-24 to Leu-33. | |
| 14 | HMUBI13 | 1189811 | 24 | 1032-271 | 168 | Cys-35 to Val-41, | AR089: 17, AR061: 2 |
| | | | | | | Asn-52 to Asn-64, | H0521: 5, L0759: 4, |
| | | | | | | Gly-81 to Gly-88, | S0358: 3, L0757: 3, |
| | | | | | | Glu-117 to Gly-133, | S0046: 2, H0494: 2, |
| | | | | | | Arg-188 to Arg-194, | L0662: 2, L0740: 2, |
| | | | | | | Gly-200 to Gln-207, | H0663: 1, H0638: 1, |
| | | | | | | Pro-243 to His-250. | S0132: 1, H0549: 1, |
| | | | | | | | H0586: 1, H0590: 1, |
| | | | | | | | H0024: 1, H0083: 1, |
| | | | | | | | H0252: 1, H0591: 1, |
| | | | | | | | H0551: 1, H0059: 1, |
| | | | | | | | H0529: 1, L0389: 1, |
| | | | | | | | L0775: 1, L0776: 1, |
| | | | | | | | L0665: 1, L0438: 1, |
| | | | | | | | H0547: 1, H0435: 1, |
| | | | | | | | S0037: 1, L0439: 1, |
| | | | | | | | L0755: 1, S0434: 1, |
| | | | | | | | L0596: 1, L0604: 1, |
| | | | | | | | H0667: 1, H0543: 1 and |
| | | | | | | | H0422: 1. |
| | | 937820 | 97 | 237-899 | 241 | Phe-10 to Lys-15, | |
| | | | | | | Glu-108 to Gly-113, | |
| | | | | | | Pro-133 to Lys-142, | |
| | | | | | | Glu-152 to Thr-159, | |
| | | | | | | Val-196 to Glu-201, | |
| | | | | | | Val-216 to Tyr-221. | |
| 15 | HPCAO89 | 1137858 | 25 | 3-1022 | 169 | Pro-17 to Gln-27, | AR050: 18, AR054: |
| | | | | | | Gln-41 to Asn-48, | 18, AR089: 5, AR051: |
| | | | | | | Ser-71 to Arg-80, | 4, AR061: 2 |
| | | | | | | Glu-87 to Thr-96, | L0761: 1 and S0146: 1. |
| | | | | | | Glu-102 to Gly-107, | |
| | | | | | | Lys-133 to Phe-140, | |
| | | | | | | Lys-205 to Asn-212. | |
| | | 946913 | 98 | 1-369 | 242 | Pro-18 to Gln-28, | |
| | | | | | | Gln-42 to Asn-49, | |
| | | | | | | Ser-72 to Arg-81. | |
| 16 | HE2KN09 | 1163877 | 26 | 3-662 | 170 | Thr-158 to Gly-164, | AR089: 18, AR061: 13 |
| | | | | | | Thr-205 to Leu-212. | L0776: 4, L0783: 4, |
| | | | | | | | H0624: 3, H0559: 3, |
| | | | | | | | H0620: 3, H0615: 3, |
| | | | | | | | H0100: 3, L0769: 3, |
| | | | | | | | L0755: 3, H0619: 2, |
| | | | | | | | H0081: 2, L0766: 2, |
| | | | | | | | L0775: 2, L0375: 2, |
| | | | | | | | L0659: 2, L0809: 2, |
| | | | | | | | H0670: 2, H0672: 2, |
| | | | | | | | H0539: 2, L0777: 2, |
| | | | | | | | L0759: 2, T0002: 1, |
| | | | | | | | H0295: 1, T0049: 1, |
| | | | | | | | H0657: 1, H0381: 1, |
| | | | | | | | H0661: 1, H0662: 1, |
| | | | | | | | S0376: 1, S0360: 1, |
| | | | | | | | H0550: 1, S0222: 1, |
| | | | | | | | H0486: 1, H0156: 1, |
| | | | | | | | H0599: 1, H0052: 1, |
| | | | | | | | H0597: 1, H0545: 1, |
| | | | | | | | H0012: 1, H0373: 1, |
| | | | | | | | H0266: 1, H0292: 1, |
| | | | | | | | H0284: 1, T0006: 1, |
| | | | | | | | H0604: 1, H0181: 1, |
| | | | | | | | H0617: 1, H0264: 1, |
| | | | | | | | H0413: 1, H0059: 1, |
| | | | | | | | H0494: 1, H0509: 1, |
| | | | | | | | H0529: 1, L0763: 1, |
| | | | | | | | L0770: 1, L0796: 1, |
| | | | | | | | L0639: 1, L0646: 1, |
| | | | | | | | L0643: 1, L0645: 1, |
| | | | | | | | L0774: 1, L0806: 1, |
| | | | | | | | L0519: 1, L0665: 1, |
| | | | | | | | H0144: 1, L0438: 1, |
| | | | | | | | L0352: 1, H0520: 1, |
| | | | | | | | S0126: 1, H0658: 1, |
| | | | | | | | S0378: 1, S0380: 1, |
| | | | | | | | H0521: 1, H0576: 1, |
| | | | | | | | L0439: 1, L0747: 1, |
| | | | | | | | L0750: 1, L0752: 1, |
| | | | | | | | L0753: 1, L0731: 1 and |
| | | | | | | | H0543: 1. |
| | | 951647 | 99 | 3-656 | 243 | Thr-156 to Gly-162, | |
| | | | | | | Thr-203 to Leu-210. | |
| 17 | HCWGE12 | 1171961 | 27 | 116-3 | 171 | | AR061: 1, AR089: 0 |
| | | | | | | | H0305: 3 |
| | | 967067 | 100 | 211-300 | 244 | | |
| 18 | HCEPY32 | 1199930 | 28 | 2-1132 | 172 | Ala-1 to Asp-16, | AR061: 385, AR089: |
| | | | | | | Lys-74 to Glu-84, | 280 |
| | | | | | | Leu-87 to Val-94, | L0766: 7, S0222: 2, |
| | | | | | | Cys-134 to Val-139, | H0052: 2, H0561: 2, |
| | | | | | | Arg-154 to Tyr-190, | L0774: 2, L0777: 2, |
| | | | | | | Thr-208 to Asn-214, | H0156: 1, S0010: 1, |
| | | | | | | Asp-222 to Asp-229, | H0264: 1, H0625: 1, |
| | | | | | | Thr-234 to Pro-255, | L0761: 1, L0806: 1, |
| | | | | | | Pro-267 to Pro-277, | L0776: 1, L0790: 1, |
| | | | | | | Gln-292 to Gln-304, | L0793: 1, L0779: 1 and |
| | | | | | | Ala-317 to Cys-323, | L0752: 1. |
| | | | | | | Ser-352 to Asn-371. | |
| | | 530520 | 101 | 2-376 | 245 | | |
| 19 | HSVCH37 | 1081035 | 29 | 3-122 | 173 | | AR089: 1, AR061: 1 |
| | | | | | | | H0309: 2 |
| | | 558195 | 102 | 3-122 | 246 | | |
| 20 | HOFNL18 | 1204713 | 30 | 1-768 | 174 | Ser-24 to Gln-30, | AR089: 9, AR061: 3 |
| | | | | | | Gln-41 to Arg-51, | H0415: 1 and H0414: |
| | | | | | | Lys-56 to Lys-62, | 1. |
| | | | | | | Glu-70 to Leu-75, | |
| | | | | | | Gln-93 to Lys-99, | |
| | | | | | | Arg-104 to Lys-110, | |
| | | | | | | Asp-120 to Asp-134, | |
| | | | | | | His-149 to Gly-170, | |
| | | | | | | Glu-200 to Ala-219, | |
| | | | | | | Glu-226 to Arg-237, | |
| | | | | | | Glu-245 to Arg-252. | |
| | | 666498 | 103 | 1-405 | 247 | Ser-26 to Pro-33. | |
| 21 | HTOCG37 | 1189012 | 31 | 117-863 | 175 | Pro-54 to Asn-65, | AR061: 11, AR089: 6 |
| | | | | | | Glu-116 to Cys-122, | L0777: 4, L0766: 3, |
| | | | | | | Pro-124 to Glu-131, | L0776: 3, L0439: 3, |
| | | | | | | Gln-170 to Gln-177, | H0031: 2, L0809: 2, |
| | | | | | | Asp-227 to Asp-236. | H0694: 2, L0591: 2, |
| | | | | | | | S6024: 1, H0656: 1, |
| | | | | | | | H0369: 1, H0051: 1, |
| | | | | | | | T0067: 1, H0272: 1, |
| | | | | | | | L0769: 1, L0805: 1, |
| | | | | | | | L0518: 1, L0519: 1, |
| | | | | | | | H0684: 1, L0779: 1, |
| | | | | | | | S0031: 1, L0584: 1 and |
| | | | | | | | L0366: 1. |
| | | 708888 | 104 | 3-218 | 248 | Asn-7 to Thr-18, | |
| | | | | | | Glu-34 to Ser-39, | |
| | | | | | | His-59 to Asn-64. | |
| 22 | HTEOF80 | 1143414 | 32 | 295-1047 | 176 | Phe-1 to Ala-15, | AR061: 7, AR089: 3 |
| | | | | | | Gly-26 to Gly-32, | H0616: 3 |
| | | | | | | Leu-35 to Pro-40, | |
| | | | | | | Gln-54 to Ser-71, | |
| | | | | | | Glu-87 to Asn-101, | |
| | | | | | | Tyr-135 to Gln-145, | |
| | | | | | | Tyr-177 to Val-182, | |
| | | | | | | Glu-212 to Phe-233, | |
| | | | | | | Cys-235 to Gly-245. | |
| | | 847224 | 105 | 2-262 | 249 | Val-17 to Arg-23, | |
| | | | | | | Tyr-28 to Ser-34, | |
| | | | | | | Thr-41 to Cys-47. | |
| 23 | HSLDP32 | 1182295 | 33 | 404-3 | 177 | Gln-88 to His-93, | AR089: 1, AR061: 0 |
| | | | | | | Gly-114 to Cys-133. | S0028: 2, H0135: 1, |
| | | | | | | | H0163: 1 and S0044: 1. |
| | | 866241 | 106 | 12-257 | 250 | Asn-6 to Lys-13. | |
| 24 | HAICQ62 | 1182256 | 34 | 63-581 | 178 | Asp-1 to Gly-15, | AR054: 9, AR050: 7, |
| | | | | | | Glu-72 to Asp-77, | AR061: 6, AR089: 2, |
| | | | | | | Gly-113 to Val-118, | AR051: 1 |
| | | | | | | Ala-126 to Thr-133, | S0132: 2, L0806: 2, |
| | | | | | | Leu-159 to Asn-164. | S0328: 2, H0635: 1, |
| | | | | | | | H0316: 1 and H0494: 1. |
| | | 888225 | 107 | 157-672 | 251 | Asp-1 to Gly-15, | |
| | | | | | | Glu-72 to Asp-77, | |
| | | | | | | Gly-113 to Val-118, | |
| | | | | | | Ala-126 to Thr-133. | |
| 25 | HRDBE43 | 894862 | 35 | 2-1297 | 179 | Gln-34 to Arg-40, | AR054: 17, AR061: 7, |
| | | | | | | Arg-65 to Asp-70, | AR051: 4, AR089: 3, |
| | | | | | | Pro-163 to Gly-173, | AR050: 2 |
| | | | | | | Gly-220 to Asp-232, | L0776: 5, L0748: 5, |
| | | | | | | Tyr-260 to Ile-268, | L0794: 4, H0156: 2, |
| | | | | | | Gly-296 to Ser-304, | H0616: 2, L0805: 2, |
| | | | | | | Ser-334 to Arg-339, | L0777: 2, T0082: 1, |
| | | | | | | Arg-347 to Gly-352, | H0124: 1, H0591: 1, |
| | | | | | | Tyr-359 to Ser-366, | H0561: 1, L0639: 1, |
| | | | | | | Thr-391 to Met-396. | L0637: 1, L0764: 1, |
| | | | | | | | L0655: 1, L0659: 1, |
| | | | | | | | L0517: 1, L0809: 1, |
| | | | | | | | L0790: 1, H0658: 1, |
| | | | | | | | L0747: 1, L0749: 1, |
| | | | | | | | L0758: 1 and L0759: 1. |
| | | 947966 | 108 | 1287-574 | 252 | | |
| 26 | HSSKD85 | 908141 | 36 | 152-1081 | 180 | Gly-30 to Arg-38, | AR089: 5, AR061: 4 |
| | | | | | | Gln-62 to Tyr-67, | L0755: 8, H0013: 4, |
| | | | | | | His-80 to Tyr-85, | H0266: 4, L0747: 4, |
| | | | | | | Tyr-96 to Gly-112, | L0601: 4, S0026: 4, |
| | | | | | | Glu-134 to Ser-141, | H0038: 2, S0144: 2, |
| | | | | | | Ser-160 to Cys-166, | L0769: 2, L0774: 2, |
| | | | | | | Thr-173 to Trp-179, | L0517: 2, L0789: 2, |
| | | | | | | Gln-212 to Asp-222, | L0731: 2, L0758: 2, |
| | | | | | | Gly-225 to Gly-231, | H0445: 2, S0116: 1, |
| | | | | | | Gly-269 to Asp-276, | S0360: 1, H0580: 1, |
| | | | | | | Asn-303 to Asn-310. | S0222: 1, H0635: 1, |
| | | | | | | | H0581: 1, H0545: 1, |
| | | | | | | | H0457: 1, S0250: 1, |
| | | | | | | | H0617: 1, H0124: 1, |
| | | | | | | | H0316: 1, H0135: 1, |
| | | | | | | | H0538: 1, L0761: 1, |
| | | | | | | | L0764: 1, L0766: 1, |
| | | | | | | | L0803: 1, L0804: 1, |
| | | | | | | | L0657: 1, L0659: 1, |
| | | | | | | | L0782: 1, L0383: 1, |
| | | | | | | | L0809: 1, L0368: 1, |
| | | | | | | | L0665: 1, H0519: 1, |
| | | | | | | | S0330: 1, S0028: 1, |
| | | | | | | | L0740: 1, L0749: 1, |
| | | | | | | | L0750: 1, L0777: 1, |
| | | | | | | | L0757: 1, L0591: 1, |
| | | | | | | | L0599: 1, S0194: 1 and |
| | | | | | | | S0276: 1. |
| 27 | HCRMV17 | 1180333 | 37 | 495-1463 | 181 | Glu-1 to Gly-7, | AR061: 1, AR089: 1 |
| | | | | | | Gly-14 to Asp-34, | L0602: 2, S0356: 1, |
| | | | | | | Thr-61 to Leu-97, | S0250: 1, H0551: 1, |
| | | | | | | Leu-99 to Leu-106, | L0761: 1 and S0436: 1. |
| | | | | | | Ile-112 to Lys-118, | |
| | | | | | | Glu-137 to Arg-154, | |
| | | | | | | Asp-182 to His-187, | |
| | | | | | | Thr-194 to Gln-200, | |
| | | | | | | Gly-210 to Leu-215, | |
| | | | | | | Met-243 to Glu-252, | |
| | | | | | | Ser-283 to Ser-306, | |
| | | | | | | Leu-313 to Gly-319. | |
| | | 910010 | 109 | 3-689 | 253 | Tyr-28 to Leu-33, | |
| | | | | | | Ala-70 to Lys-87, | |
| | | | | | | Glu-106 to Gly-124, | |
| | | | | | | Gly-127 to Glu-160, | |
| | | | | | | Leu-179 to Asp-194. | |
| 28 | HFOXL77 | 1137799 | 38 | 1-363 | 182 | Gly-1 to Gln-7, | AR089: 10, AR061: 2 |
| | | | | | | Ser-29 to Thr-34, | L0439: 7, L0438: 4, |
| | | | | | | Asn-60 to Cys-78, | L0744: 4, L0596: 4, |
| | | | | | | Gly-114 to Phe-120. | S0010: 3, L0776: 3, |
| | | | | | | | L0517: 3, L0731: 3, |
| | | | | | | | L0599: 3, H0677: 3, |
| | | | | | | | H0265: 2, H0556: 2, |
| | | | | | | | S0222: 2, H0031: 2, |
| | | | | | | | H0673: 2, H0169: 2, |
| | | | | | | | L0761: 2, L0659: 2, |
| | | | | | | | S0126: 2, L0748: 2, |
| | | | | | | | L0747: 2, L0591: 2, |
| | | | | | | | S0194: 2, S0276: 2, |
| | | | | | | | H0650: 1, H0341: 1, |
| | | | | | | | H0255: 1, S0418: 1, |
| | | | | | | | L0005: 1, S0360: 1, |
| | | | | | | | S0046: 1, H0632: 1, |
| | | | | | | | L0622: 1, T0060: 1, |
| | | | | | | | H0122: 1, S0346: 1, |
| | | | | | | | H0581: 1, S0049: 1, |
| | | | | | | | H0024: 1, H0017: 1, |
| | | | | | | | H0071: 1, T0006: 1, |
| | | | | | | | L0142: 1, L0456: 1, |
| | | | | | | | S0036: 1, H0551: 1, |
| | | | | | | | S0386: 1, H0100: 1, |
| | | | | | | | H0494: 1, L0770: 1, |
| | | | | | | | L0769: 1, L0638: 1, |
| | | | | | | | L0772: 1, L0800: 1, |
| | | | | | | | L0766: 1, L0666: 1, |
| | | | | | | | L0664: 1, H0683: 1, |
| | | | | | | | H0660: 1, H0521: 1, |
| | | | | | | | S0027: 1, L0779: 1, |
| | | | | | | | L0777: 1, L0753: 1, |
| | | | | | | | L0755: 1, L0758: 1, |
| | | | | | | | H0445: 1 and H0667: 1. |
| | | 910698 | 110 | 102-569 | 254 | Gln-8 to Ala-13, | |
| | | | | | | Ser-46 to Thr-51, | |
| | | | | | | Asn-77 to Cys-95, | |
| | | | | | | Thr-112 to Gly-118. | |
| 29 | HBXCZ29 | 1226989 | 39 | 3-1658 | 183 | Asn-22 to Thr-27, | AR054: 10, AR050: 2, |
| | | | | | | Arg-119 to Leu-125, | AR061: 1, AR089: 1, |
| | | | | | | Thr-159 to Leu-166, | AR051: 0 |
| | | | | | | Pro-194 to Val-203, | L0756: 5, S0222: 1, |
| | | | | | | His-205 to Gly-214, | H0591: 1, T0067: 1, |
| | | | | | | Phe-245 to Gly-250, | S0038: 1 and L0485: 1. |
| | | | | | | Pro-266 to Gln-274, | |
| | | | | | | Thr-302 to Glu-310, | |
| | | | | | | Thr-372 to Asp-390, | |
| | | | | | | Lys-421 to Arg-431, | |
| | | | | | | Asp-456 to Gly-461, | |
| | | | | | | Pro-507 to Asn-512, | |
| | | | | | | Asp-521 to Ser-528, | |
| | | | | | | Val-532 to Leu-539. | |
| | | 910842 | 111 | 404-733 | 255 | Thr-27 to Ser-32. | |
| 30 | HRDBJ38 | 1227194 | 40 | 21-1010 | 184 | His-8 to Gly-18, | AR051: 19, AR089: |
| | | | | | | Ser-107 to Lys-112, | 14, AR061: 6, AR054: |
| | | | | | | Pro-173 to Leu-178, | 3 |
| | | | | | | Gln-183 to Tyr-188, | H0124: 14, L0744: 4, |
| | | | | | | Asp-194 to Asp-200. | S0036: 2, L0743: 2, |
| | | | | | | | L0759: 2, H0581: 1, |
| | | | | | | | H0457: 1, L0163: 1, |
| | | | | | | | H0616: 1, L0763: 1, |
| | | | | | | | L0776: 1, L0659: 1, |
| | | | | | | | L0783: 1, L0666: 1, |
| | | | | | | | L0750: 1 and L0779: 1. |
| | | 917583 | 112 | 2-859 | 256 | | |
| 31 | HCOKA10 | 907080 | 41 | 605-171 | 185 | Phe-13 to Thr-22. | AR054: 7, AR061: 2, |
| | | | | | | | AR089: 1, AR051: 1 |
| | | | | | | | H0636: 1 |
| | | 918918 | 113 | 1663-1220 | 257 | | |
| | | 919869 | 114 | 1-396 | 258 | Pro-1 to Ser-9, | |
| | | | | | | Asp-127 to Asn-132. | |
| 32 | HKGDI91 | 1137801 | 42 | 81-536 | 186 | Asp-1 to Ser-6, | AR089: 19, AR061: 2 |
| | | | | | | Ser-20 to Phe-25, | S0007: 1, H0318: 1, |
| | | | | | | Gln-33 to Phe-39, | H0538: 1 and H0547: 1. |
| | | | | | | Ser-91 to Asp-98, | |
| | | | | | | Pro-104 to Gly-119, | |
| | | | | | | Pro-133 to Trp-143. | |
| | | 927222 | 115 | 81-446 | 259 | Asp-1 to Ser-6, | |
| | | | | | | Ser-20 to Phe-25, | |
| | | | | | | Gln-33 to Phe-39, | |
| | | | | | | Ser-91 to Asp-98, | |
| | | | | | | Pro-104 to Gly-110, | |
| | | | | | | Asn-114 to Trp-120. | |
| 33 | HMKBA52 | 1151501 | 43 | 616-2 | 187 | Arg-15 to Phe-22, | AR089: 6, AR061: 5 |
| | | | | | | Pro-29 to Ile-36, | L0766: 5, L0754: 5, |
| | | | | | | Arg-38 to Glu-47, | H0617: 4, L0748: 4, |
| | | | | | | Gly-53 to Arg-66, | L0758: 4, H0381: 3, |
| | | | | | | Gly-96 to Asp-102, | L0773: 3, L0803: 3, |
| | | | | | | Ser-113 to Tyr-123, | L0776: 3, L0655: 3, |
| | | | | | | Ala-177 to Arg-200. | L0659: 3, L0744: 3, |
| | | | | | | | H0150: 2, H0023: 2, |
| | | | | | | | H0057: 2, H0641: 2, |
| | | | | | | | L0763: 2, L0646: 2, |
| | | | | | | | L0794: 2, L0378: 2, |
| | | | | | | | L0805: 2, S0126: 2, |
| | | | | | | | L0747: 2, L0750: 2, |
| | | | | | | | H0624: 1, H0171: 1, |
| | | | | | | | H0656: 1, H0638: 1, |
| | | | | | | | S0360: 1, S0408: 1, |
| | | | | | | | H0645: 1, H0549: 1, |
| | | | | | | | H0441: 1, H0370: 1, |
| | | | | | | | H0392: 1, H0486: 1, |
| | | | | | | | H0013: 1, S0280: 1, |
| | | | | | | | L0021: 1, S0049: 1, |
| | | | | | | | H0050: 1, H0328: 1, |
| | | | | | | | H0181: 1, H0063: 1, |
| | | | | | | | H0264: 1, H0625: 1, |
| | | | | | | | L0369: 1, L0371: 1, |
| | | | | | | | L0761: 1, L0772: 1, |
| | | | | | | | L0800: 1, L0662: 1, |
| | | | | | | | L0768: 1, L0364: 1, |
| | | | | | | | L0774: 1, L0523: 1, |
| | | | | | | | L0806: 1, L0653: 1, |
| | | | | | | | L0807: 1, L0809: 1, |
| | | | | | | | L0647: 1, L0664: 1, |
| | | | | | | | S0052: 1, S0216: 1, |
| | | | | | | | S0374: 1, H0670: 1, |
| | | | | | | | H0521: 1, H0522: 1, |
| | | | | | | | S0027: 1, L0742: 1, |
| | | | | | | | L0743: 1, L0745: 1, |
| | | | | | | | L0779: 1, L0755: 1, |
| | | | | | | | L0608: 1, H0423: 1 and |
| | | | | | | | H0506: 1. |
| | | 937325 | 116 | 61-387 | 260 | Arg-1 to Ala-10, | |
| | | | | | | Arg-61 to Gly-68, | |
| | | | | | | Ala-73 to Lys-82. | |
| 34 | HLCMP75 | 1203728 | 44 | 121-1164 | 188 | Glu-19 to Glu-30, | AR051: 1, AR050: 1, |
| | | | | | | Asp-86 to Glu-95, | AR054: 1, AR061: 1, |
| | | | | | | Pro-127 to Pro-145, | AR089: 1 |
| | | | | | | Thr-204 to Trp-210, | H0545: 9, H0333: 4, |
| | | | | | | Ser-248 to Pro-257, | L0754: 4, H0544: 3, |
| | | | | | | Ser-259 to Ser-277, | H0546: 3, L0794: 3, |
| | | | | | | His-304 to Arg-310, | L0743: 3, L0744: 3, |
| | | | | | | Pro-341 to His-347. | L0757: 3, S0212: 2, |
| | | | | | | | S0360: 2, H0619: 2, |
| | | | | | | | H0124: 2, L0771: 2, |
| | | | | | | | L0521: 2, S0027: 2, |
| | | | | | | | L0751: 2, L0777: 2, |
| | | | | | | | L0605: 2, H0550: 1, |
| | | | | | | | L0623: 1, H0013: 1, |
| | | | | | | | H0150: 1, H0086: 1, |
| | | | | | | | H0123: 1, H0288: 1, |
| | | | | | | | H0553: 1, H0644: 1, |
| | | | | | | | H0628: 1, H0181: 1, |
| | | | | | | | H0163: 1, H0087: 1, |
| | | | | | | | H0100: 1, L0803: 1, |
| | | | | | | | L0655: 1, L0656: 1, |
| | | | | | | | L0659: 1, L0384: 1, |
| | | | | | | | L0809: 1, L0565: 1, |
| | | | | | | | H0547: 1, H0658: 1, |
| | | | | | | | S0037: 1, S0028: 1, |
| | | | | | | | S0206: 1, L0603: 1 and |
| | | | | | | | H0665: 1. |
| | | 944722 | 117 | 2-946 | 261 | Ala-17 to Ala-27, | |
| | | | | | | Pro-30 to Cys-35, | |
| | | | | | | Pro-37 to His-46, | |
| | | | | | | Pro-53 to Glu-66, | |
| | | | | | | Asp-122 to Glu-131, | |
| | | | | | | Pro-163 to Gln-172. | |
| 35 | HWHQR25 | 1126358 | 45 | 1-522 | 189 | Pro-1 to Cys-10, | AR054: 164, AR050: |
| | | | | | | Asn-14 to Thr-23, | 143, AR051: 118, |
| | | | | | | Cys-27 to Trp-33, | AR089: 1, AR061: 1 |
| | | | | | | Gln-40 to Asn-53, | L0794: 5, L0777: 4, |
| | | | | | | Ala-55 to Tyr-65, | H0509: 2, L0772: 2, |
| | | | | | | Glu-84 to Tyr-103, | L0804: 2, H0144: 2, |
| | | | | | | Gly-132 to Pro-141, | L0754: 2, L0747: 2, |
| | | | | | | Pro-154 to Gly-162, | S0045: 1, S6022: 1, |
| | | | | | | Pro-169 to Ala-174. | H0392: 1, H0592: 1, |
| | | | | | | | H0587: 1, H0486: 1, |
| | | | | | | | T0010: 1, H0623: 1, |
| | | | | | | | L0800: 1, L0643: 1, |
| | | | | | | | L0764: 1, L0768: 1, |
| | | | | | | | L0803: 1, L0653: 1, |
| | | | | | | | L0665: 1 and L0750: 1. |
| | | 947020 | 118 | 2-565 | 262 | Asn-7 to Thr-16, | |
| | | | | | | Cys-20 to Trp-26, | |
| | | | | | | Gln-33 to Asn-46, | |
| | | | | | | Ala-48 to Tyr-58, | |
| | | | | | | Glu-77 to Tyr-96. | |
| 36 | HLKAB61 | 1183217 | 46 | 96-470 | 190 | Gln-28 to Tyr-33, | AR089: 3, AR061: 1 |
| | | | | | | His-46 to Tyr-51, | H0386: 2 and H0610: |
| | | | | | | Tyr-62 to Gly-78, | 1. |
| | | | | | | Gly-84 to Asp-91, | |
| | | | | | | Asn-118 to Asn-125. | |
| | | 948002 | 119 | 75-296 | 263 | | |
| 37 | HEGAZ61 | 1226372 | 47 | 12-2096 | 191 | Leu-45 to Lys-50, | AR050: 66, AR054: |
| | | | | | | Gln-55 to Glu-74, | 55, AR051: 37, AR089: |
| | | | | | | Thr-114 to Ile-119, | 11, AR061: 6 |
| | | | | | | Ile-151 to Tyr-156, | H0549: 1 and H0550: |
| | | | | | | Lys-162 to Gly-167, | 1. |
| | | | | | | Asn-190 to Lys-207, | |
| | | | | | | Thr-226 to Ile-242, | |
| | | | | | | Lys-293 to Asp-300, | |
| | | | | | | Gly-358 to Phe-364, | |
| | | | | | | Ser-387 to Pro-403, | |
| | | | | | | Gly-422 to Cys-434, | |
| | | | | | | Pro-436 to Asp-446, | |
| | | | | | | Pro-478 to Asp-484, | |
| | | | | | | Pro-497 to Arg-502, | |
| | | | | | | Pro-507 to Gly-513, | |
| | | | | | | Cys-520 to Cys-527, | |
| | | | | | | Met-545 to Arg-561, | |
| | | | | | | Lys-595 to Ala-601, | |
| | | | | | | Cys-649 to Gly-662, | |
| | | | | | | His-666 to Gln-671. | |
| | | 950033 | 120 | 12-560 | 264 | Leu-45 to Lys-50, | |
| | | | | | | Gln-55 to Glu-74, | |
| | | | | | | Thr-114 to Ile-119. | |
| 38 | HPJEQ52 | 1216564 | 48 | 2-505 | 192 | Ala-9 to Arg-14, | AR089: 13, AR061: 6 |
| | | | | | | Gln-65 to Glu-70, | S0007: 5, L0803: 3, |
| | | | | | | His-109 to Ser-123, | S0126: 2, S0222: 1, |
| | | | | | | Leu-145 to Asp-156. | H0581: 1, H0494: 1, |
| | | | | | | | L0800: 1, L0764: 1, |
| | | | | | | | H0520: 1 and S0152: 1. |
| | | 953155 | 121 | 2-559 | 265 | | |
| 39 | HFIZB56 | 1137798 | 49 | 2-799 | 193 | Thr-23 to Ser-30, | AR089: 31, AR054: |
| | | | | | | Arg-58 to Asp-64, | 28, AR050: 26, AR051: |
| | | | | | | Ala-75 to Asn-82, | 24, AR061: 3 |
| | | | | | | Glu-103 to Gln-112, | S0250: 1, H0030: 1, |
| | | | | | | Leu-119 to Thr-141, | H0521: 1, S0192: 1 and |
| | | | | | | Lys-175 to Tyr-182, | S0242: 1. |
| | | | | | | Asn-211 to Asn-218. | |
| | | 955618 | 122 | 3-680 | 266 | Thr-23 to Ser-30, | |
| | | | | | | Arg-58 to Asp-64, | |
| | | | | | | Ala-75 to Asn-82, | |
| | | | | | | Glu-103 to Gln-112, | |
| | | | | | | Leu-119 to Cys-126. | |
| 40 | HUKEP18 | 1106982 | 50 | 1-588 | 194 | | AR061: 14, AR054: |
| | | | | | | | 11, AR050: 9, AR089: |
| | | | | | | | 4 |
| | | | | | | | L0758: 2, H0059: 1, |
| | | | | | | | L0789: 1, L0665: 1, |
| | | | | | | | L0749: 1 and L0779: 1. |
| | | 957456 | 123 | 852-265 | 267 | | |
| 41 | HEEAN63 | 1105522 | 51 | 220-930 | 195 | Arg-53 to Asp-64, | AR061: 1, AR089: 1 |
| | | | | | | Pro-68 to Asp-76, | S0360: 1, H0261: 1, |
| | | | | | | Val-107 to Lys-112, | H0549: 1, H0550: 1, |
| | | | | | | Gln-128 to Val-137, | H0553: 1, H0038: 1, |
| | | | | | | Gln-150 to Tyr-167, | H0040: 1, L0803: 1, |
| | | | | | | Gly-197 to Arg-202, | L0804: 1, L0775: 1, |
| | | | | | | Ala-215 to Leu-221. | L0806: 1, L0809: 1, |
| | | | | | | | L0666: 1, H0519: 1, |
| | | | | | | | H0521: 1, L0750: 1, |
| | | | | | | | H0136: 1, H0543: 1 and |
| | | | | | | | H0352: 1. |
| | | 960233 | 124 | 183-722 | 268 | | |
| 42 | HTKAA03 | 961002 | 52 | 2-202 | 196 | Asn-1 to Thr-9, | S0300: 1, S0028: 1 and |
| | | | | | | Thr-40 to Asp-51. | T0047: 1. |
| 43 | HTTKB18 | 963346 | 53 | 2-2440 | 197 | Thr-20 to Leu-32, | AR089: 14, AR061: 6 |
| | | | | | | Phe-102 to Lys-107, | L0439: 9, L0740: 9, |
| | | | | | | Ser-138 to Ile-146, | L0794: 8, L0747: 8, |
| | | | | | | Pro-179 to Asp-192, | L0731: 8, L0744: 6, |
| | | | | | | Gln-217 to Glu-232, | L0592: 6, L0599: 6, |
| | | | | | | Ser-355 to Ser-361, | H0341: 5, S0222: 5, |
| | | | | | | Tyr-447 to Met-453, | S0010: 5, H0038: 5, |
| | | | | | | Gln-486 to Asp-503, | H0521: 5, S3014: 5, |
| | | | | | | Arg-516 to Gln-523, | L0750: 5, L0752: 5, |
| | | | | | | Ala-530 to Ile-542, | H0542: 5, H0170: 4, |
| | | | | | | Lys-561 to Cys-574, | H0040: 4, H0056: 4, |
| | | | | | | Asp-633 to Lys-639, | L0659: 4, L0748: 4, |
| | | | | | | Glu-660 to Leu-666, | L0756: 4, L0608: 4, |
| | | | | | | Leu-678 to Arg-685, | H0638: 3, H0580: 3, |
| | | | | | | Ser-696 to Glu-705, | H0156: 3, H0024: 3, |
| | | | | | | Ile-767 to Asn-773, | H0494: 3, L0766: 3, |
| | | | | | | Glu-775 to His-786, | L0649: 3, L0805: 3, |
| | | | | | | Arg-797 to Pro-806. | L0809: 3, L0665: 3, |
| | | | | | | | H0144: 3, H0672: 3, |
| | | | | | | | L0757: 3, L0758: 3, |
| | | | | | | | L0759: 3, H0624: 2, |
| | | | | | | | S0134: 2, L0415: 2, |
| | | | | | | | S0360: 2, H0329: 2, |
| | | | | | | | S0046: 2, H0575: 2, |
| | | | | | | | H0036: 2, L0471: 2, |
| | | | | | | | H0266: 2, S0003: 2, |
| | | | | | | | H0090: 2, H0551: 2, |
| | | | | | | | H0264: 2, H0412: 2, |
| | | | | | | | S0150: 2, L0774: 2, |
| | | | | | | | L0775: 2, L0375: 2, |
| | | | | | | | L0655: 2, L0519: 2, |
| | | | | | | | L0666: 2, L0664: 2, |
| | | | | | | | L0565: 2, L0438: 2, |
| | | | | | | | H0520: 2, H0547: 2, |
| | | | | | | | H0660: 2, S0044: 2, |
| | | | | | | | H0555: 2, S0027: 2, |
| | | | | | | | S0206: 2, L0754: 2, |
| | | | | | | | L0777: 2, H0445: 2, |
| | | | | | | | L0589: 2, H0423: 2, |
| | | | | | | | H0556: 1, S0040: 1, |
| | | | | | | | S0114: 1, T0049: 1, |
| | | | | | | | H0656: 1, S0116: 1, |
| | | | | | | | S0212: 1, H0664: 1, |
| | | | | | | | S0420: 1, S0354: 1, |
| | | | | | | | S0358: 1, S0045: 1, |
| | | | | | | | S0132: 1, H0619: 1, |
| | | | | | | | S6026: 1, S0278: 1, |
| | | | | | | | H0369: 1, H0392: 1, |
| | | | | | | | H0438: 1, H0643: 1, |
| | | | | | | | S0346: 1, H0318: 1, |
| | | | | | | | H0310: 1, H0309: 1, |
| | | | | | | | H0263: 1, T0110: 1, |
| | | | | | | | H0439: 1, H0041: 1, |
| | | | | | | | H0562: 1, H0123: 1, |
| | | | | | | | H0050: 1, H0373: 1, |
| | | | | | | | T0010: 1, S6028: 1, |
| | | | | | | | S0214: 1, H0428: 1, |
| | | | | | | | H0622: 1, H0031: 1, |
| | | | | | | | H0644: 1, H0166: 1, |
| | | | | | | | H0674: 1, S0364: 1, |
| | | | | | | | H0634: 1, H0616: 1, |
| | | | | | | | T0067: 1, H0477: 1, |
| | | | | | | | H0623: 1, T0069: 1, |
| | | | | | | | S0112: 1, L0564: 1, |
| | | | | | | | T0041: 1, H0429: 1, |
| | | | | | | | H0560: 1, H0625: 1, |
| | | | | | | | S0294: 1, S0450: 1, |
| | | | | | | | S0142: 1, S0422: 1, |
| | | | | | | | S0002: 1, H0695: 1, |
| | | | | | | | H0026: 1, L0763: 1, |
| | | | | | | | L0772: 1, L0643: 1, |
| | | | | | | | L0764: 1, L0768: 1, |
| | | | | | | | L0387: 1, L0381: 1, |
| | | | | | | | L0803: 1, L0806: 1, |
| | | | | | | | L0654: 1, L0606: 1, |
| | | | | | | | L0526: 1, L0529: 1, |
| | | | | | | | L0647: 1, L0789: 1, |
| | | | | | | | H0698: 1, L0352: 1, |
| | | | | | | | H0519: 1, H0690: 1, |
| | | | | | | | H0435: 1, H0648: 1, |
| | | | | | | | S0378: 1, S0152: 1, |
| | | | | | | | H0522: 1, H0696: 1, |
| | | | | | | | S0146: 1, H0626: 1, |
| | | | | | | | S0037: 1, L0753: 1, |
| | | | | | | | H0444: 1, L0480: 1, |
| | | | | | | | H0667: 1, S0192: 1, |
| | | | | | | | H0543: 1, S0042: 1, |
| | | | | | | | S0424: 1 and H0506: 1. |
| 44 | HPTZB93 | 1222478 | 54 | 243-935 | 198 | Glu-1 to Lys-8, | AR089: 61, AR061: |
| | | | | | | Asn-32 to Arg-43. | 22, AR051: 14, AR050: |
| | | | | | | | 2, AR054: 0 |
| | | | | | | | L0776: 5, L0789: 5, |
| | | | | | | | L0769: 3, L0805: 3, |
| | | | | | | | H0231: 1, H0213: 1, |
| | | | | | | | H0418: 1, L0794: 1, |
| | | | | | | | L0750: 1 and L0731: 1. |
| | | 971842 | 125 | 850-164 | 269 | | |
| 45 | HTSHM38 | 1138085 | 55 | 432-1157 | 199 | Phe-28 to Arg-33, | AR051: 26, AR054: |
| | | | | | | Pro-46 to Trp-51, | 20, AR050: 18, AR089: |
| | | | | | | Pro-54 to Pro-61, | 6, AR061: 2 |
| | | | | | | Arg-99 to Trp-108, | H0087: 1 and H0264: |
| | | | | | | Pro-174 to Gly-186, | 1. |
| | | | | | | Glu-213 to Ala-225, | |
| | | | | | | Pro-230 to Arg-242. | |
| | | 972248 | 126 | 2-604 | 270 | Asn-6 to Ser-15, | |
| | | | | | | Pro-29 to Arg-42, | |
| | | | | | | Pro-91 to Gln-108, | |
| | | | | | | Lys-123 to Arg-133, | |
| | | | | | | Ile-157 to Phe-168, | |
| | | | | | | Gln-171 to Val-178, | |
| | | | | | | Gly-185 to Pro-197. | |
| 46 | HELDY60 | 1056195 | 56 | 3-2633 | 200 | Pro-10 to Arg-25, | AR051: 10, AR054: 8, |
| | | | | | | Arg-27 to Phe-36, | AR061: 3, AR089: 2 |
| | | | | | | Tyr-40 to Thr-46, | H0170: 2, H0031: 2, |
| | | | | | | Val-50 to Ile-58, | L0748: 2, H0624: 1, |
| | | | | | | Gly-77 to Ser-87, | S0360: 1, S0045: 1, |
| | | | | | | Pro-89 to Asn-118, | H0013: 1, H0046: 1, |
| | | | | | | Ser-120 to Trp-125, | H0068: 1, H0038: 1, |
| | | | | | | Thr-127 to Gly-156, | L0662: 1, L0805: 1, |
| | | | | | | Pro-158 to Met-169, | L0776: 1, H0519: 1, |
| | | | | | | Asp-173 to Trp-179, | H0696: 1 and L0731: 1. |
| | | | | | | Gly-190 to Asp-201, | |
| | | | | | | Pro-211 to Gln-218, | |
| | | | | | | Pro-228 to Arg-235, | |
| | | | | | | Asp-258 to Asp-263, | |
| | | | | | | Asp-366 to Gln-373, | |
| | | | | | | Asp-405 to Arg-410, | |
| | | | | | | Glu-424 to Ile-430, | |
| | | | | | | Lys-444 to Ser-453, | |
| | | | | | | Pro-475 to Asn-482, | |
| | | | | | | Asp-500 to Asp-508, | |
| | | | | | | Arg-514 to Asn-525, | |
| | | | | | | Ser-538 to Asp-545, | |
| | | | | | | Asp-551 to Ser-558, | |
| | | | | | | Pro-560 to Cys-565, | |
| | | | | | | Pro-578 to Met-588, | |
| | | | | | | Asn-591 to Tyr-611, | |
| | | | | | | Gly-620 to Asn-626, | |
| | | | | | | Glu-634 to Tyr-644, | |
| | | | | | | Gln-646 to Tyr-655, | |
| | | | | | | Arg-661 to Gly-669, | |
| | | | | | | Glu-687 to Gly-693, | |
| | | | | | | Pro-701 to Asp-714, | |
| | | | | | | Pro-744 to Val-754, | |
| | | | | | | Arg-837 to Thr-844. | |
| | | 945815 | 127 | 3-179 | 271 | | |
| | | 975104 | 128 | 73-2472 | 272 | Pro-19 to Arg-34, | |
| | | | | | | Arg-36 to Phe-45, | |
| | | | | | | Tyr-49 to Thr-55, | |
| | | | | | | Val-59 to Ile-67, | |
| | | | | | | Gly-86 to Ser-96, | |
| | | | | | | Pro-98 to Asn-127, | |
| | | | | | | Ser-129 to Trp-134, | |
| | | | | | | Thr-136 to Gly-165, | |
| | | | | | | Pro-167 to Met-178, | |
| | | | | | | Asp-182 to Trp-188. | |
| 47 | HNALE30 | 1219068 | 57 | 23-1852 | 201 | Pro-6 to Ser-17, | AR089: 3, AR061: 1 |
| | | | | | | Pro-30 to Ser-35, | H0135: 2, H0144: 2, |
| | | | | | | Ser-47 to Ser-57, | L0439: 2, L0752: 2, |
| | | | | | | Thr-63 to Ile-70, | H0619: 1, H0550: 1, |
| | | | | | | Lys-80 to Lys-88, | H0083: 1, H0288: 1, |
| | | | | | | Thr-108 to Ser-117, | H0040: 1, H0063: 1, |
| | | | | | | Pro-129 to Glu-134, | H0380: 1, L0519: 1, |
| | | | | | | Gln-164 to Ser-175, | L0438: 1, H0684: 1, |
| | | | | | | Val-273 to Leu-281. | S0027: 1, S0206: 1, |
| | | | | | | | L0743: 1, L0748: 1, |
| | | | | | | | L0754: 1 and H0543: 1. |
| | | 526878 | 129 | 2-163 | 273 | Leu-1 to Lys-11, | |
| | | | | | | Thr-31 to Ser-40. | |
| 48 | HWADY16 | 1182316 | 58 | 306-1007 | 202 | Pro-1 to Pro-15, | AR089: 1, AR061: 0 |
| | | | | | | Tyr-51 to Asp-56, | L0800: 2, L0766: 2, |
| | | | | | | Asp-78 to Asn-88, | L0777: 2, H0581: 1, |
| | | | | | | Ala-101 to Glu-106, | H0553: 1, L0771: 1, |
| | | | | | | Gly-112 to Glu-117, | L0803: 1, L0774: 1, |
| | | | | | | Ala-153 to Arg-161, | L0792: 1, H0522: 1, |
| | | | | | | Glu-166 to Ser-176, | L0740: 1, L0755: 1, |
| | | | | | | Lys-192 to Ala-224, | L0731: 1 and H0543: 1. |
| | | | | | | Arg-226 to Arg-234. | |
| | | 661322 | 130 | 3-254 | 274 | Pro-2 to Gly-9. | |
| 49 | HNTRU73 | 1173875 | 59 | 3-530 | 203 | Ala-35 to Lys-52, | AR089: 2, AR061: 1 |
| | | | | | | Glu-58 to Glu-84, | H0547: 1 |
| | | | | | | Leu-103 to Asp-118, | |
| | | | | | | Thr-145 to Arg-176. | |
| | | 910009 | 131 | 3-1190 | 275 | Ala-35 to Lys-52, | |
| | | | | | | Glu-58 to Glu-82. | |
| 50 | HLHCR16 | 910123 | 60 | 2-3418 | 204 | Pro-9 to Pro-15, | AR050: 9, AR061: 2, |
| | | | | | | Gly-49 to Trp-54, | AR054: 2, AR089: 2, |
| | | | | | | Ser-91 to Phe-96, | AR051: 2 |
| | | | | | | Thr-109 to Asp-115, | L0754: 14, L0777: 13, |
| | | | | | | Cys-124 to Ile-130, | H0553: 10, L0600: 7, |
| | | | | | | Cys-164 to Trp-169, | L0748: 6, L0803: 4, |
| | | | | | | Thr-193 to Asp-207, | L0749: 4, UNKWN: 4, |
| | | | | | | Thr-215 to Tyr-220, | H0624: 3, S0280: 3, |
| | | | | | | Thr-228 to Ser-240, | S0126: 3, L0747: 3, |
| | | | | | | Glu-269 to Ser-276, | S0282: 2, H0024: 2, |
| | | | | | | Glu-327 to Ala-334, | H0030: 2, H0031: 2, |
| | | | | | | Asn-376 to Asp-392, | H0040: 2, L0438: 2, |
| | | | | | | Gln-420 to Asn-428, | S0028: 2, L0743: 2, |
| | | | | | | Tyr-547 to Ser-566, | L0596: 2, L0603: 2, |
| | | | | | | Ala-616 to Gly-623, | S0212: 1, H0270: 1, |
| | | | | | | Pro-625 to Ser-631, | H0244: 1, H0427: 1, |
| | | | | | | Ser-647 to Val-653, | H0251: 1, H0309: 1, |
| | | | | | | Gly-676 to Pro-681, | S0338: 1, S0340: 1, |
| | | | | | | Tyr-720 to Glu-740, | S0250: 1, H0252: 1, |
| | | | | | | Ile-742 to Lys-748, | H0039: 1, L0143: 1, |
| | | | | | | Asp-792 to Cys-804, | H0038: 1, L0659: 1, |
| | | | | | | Leu-841 to Val-848, | L0565: 1, H0593: 1, |
| | | | | | | Gln-850 to Gly-857, | H0684: 1, H05 18: 1, |
| | | | | | | Asp-879 to Gly-886, | S0390: 1, S0260: 1 and |
| | | | | | | His-906 to Trp-913, | H0506: 1. |
| | | | | | | Pro-968 to Thr-975, | |
| | | | | | | Gln-1051 to Ser-1057, | |
| | | | | | | Pro-1092 to Cys-1099, | |
| | | | | | | Lys-1113 to Cys-1120, | |
| | | | | | | Trp-1126 to Phe-1139. | |
| | | 965511 | 132 | 2-1492 | 276 | Pro-9 to Pro-15, | |
| | | | | | | Gly-49 to Trp-54, | |
| | | | | | | Ser-91 to Phe-96, | |
| | | | | | | Thr-109 to Asp-115, | |
| | | | | | | Cys-124 to Ile-130, | |
| | | | | | | Cys-164 to Trp-169, | |
| | | | | | | Thr-193 to Asp-207, | |
| | | | | | | Thr-215 to Tyr-220, | |
| | | | | | | Thr-228 to Ser-240, | |
| | | | | | | Glu-269 to Ser-276, | |
| | | | | | | Glu-327 to Ala-334, | |
| | | | | | | Asn-376 to Asp-392, | |
| | | | | | | Gln-420 to Asn-428. | |
| 51 | HFKJO15 | 910828 | 61 | 3-539 | 205 | Ser-1 to Phe-13, | AR061: 0, AR089: 0 |
| | | | | | | Ala-15 to Gln-22, | L0769: 3, L0803: 3, |
| | | | | | | Pro-39 to Cys-50, | L0748: 3, L0749: 3, |
| | | | | | | Gly-58 to Gln-69, | H0574: 2, H0046: 2, |
| | | | | | | Pro-84 to Asp-92, | H0620: 2, L0794: 2, |
| | | | | | | Tyr-100 to Cys-117, | L0776: 2, L0659: 2, |
| | | | | | | Lys-123 to Ala-129, | L0439: 2, L0754: 2, |
| | | | | | | Asp-134 to Asp-148, | L0747: 2, L0777: 2, |
| | | | | | | Gly-157 to Arg-167. | L0755: 2, L0605: 2, |
| | | | | | | | L0593: 2, H0686: 1, |
| | | | | | | | S0360: 1, L0717: 1, |
| | | | | | | | H0069: 1, H0575: 1, |
| | | | | | | | H0546: 1, H0024: 1, |
| | | | | | | | S0388: 1, H0510: 1, |
| | | | | | | | H0266: 1, H0644: 1, |
| | | | | | | | H0163: 1, H0090: 1, |
| | | | | | | | H0634: 1, H0561: 1, |
| | | | | | | | H0695: 1, L0763: 1, |
| | | | | | | | L0804: 1, L0774: 1, |
| | | | | | | | L0775: 1, L0783: 1, |
| | | | | | | | L0809: 1, L0666: 1, |
| | | | | | | | L0665: 1, L0438: 1, |
| | | | | | | | H0658: 1, H0539: 1, |
| | | | | | | | S0152: 1, H0522: 1, |
| | | | | | | | L0740: 1, L0757: 1, |
| | | | | | | | L0603: 1, S0276: 1 and |
| | | | | | | | H0542: 1. |
| 52 | HMEIS32 | 1164006 | 62 | 2-1477 | 206 | Ile-89 to Gly-106, | AR089: 0, AR061: 0 |
| | | | | | | Pro-161 to Glu-174, | H0593: 3, H0694: 3, |
| | | | | | | Ser-192 to Pro-205, | S0376: 2, S0222: 2, |
| | | | | | | Gln-231 to Arg-238, | H0545: 2, H0561: 2, |
| | | | | | | Asp-246 to Arg-262, | H0658: 2, H0556: 1, |
| | | | | | | Leu-285 to Ser-310, | H0587: 1, H0318: 1, |
| | | | | | | Ala-323 to Glu-344, | H0581: 1, H0266: 1, |
| | | | | | | Arg-384 to Pro-394, | H0622: 1, H0063: 1, |
| | | | | | | Leu-416 to Ser-428, | H0551: 1, H0623: 1, |
| | | | | | | Arg-436 to Asp-450, | L0763: 1, L0637: 1, |
| | | | | | | Ser-475 to Gly-486. | L0794: 1, L0375: 1, |
| | | | | | | | L0666: 1, L0663: 1, |
| | | | | | | | H0435: 1, H0672: 1, |
| | | | | | | | L0748: 1, L0758: 1, |
| | | | | | | | H0665: 1 and S0196: 1. |
| | | 911439 | 133 | 69-413 | 277 | | |
| 53 | H0GDR01 | 1133383 | 63 | 2-1054 | 207 | | AR054: 7, AR089: 2, |
| | | | | | | | AR061: 2, AR051: 1, |
| | | | | | | | AR050: 0 |
| | | | | | | | L0662: 3, L0653: 3, |
| | | | | | | | L0648: 2, L0659: 2, |
| | | | | | | | L0666: 2, H0435: 2, |
| | | | | | | | S0376: 1, H0550: 1, |
| | | | | | | | H0264: 1, S0472: 1, |
| | | | | | | | L0800: 1, L0643: 1, |
| | | | | | | | L0649: 1, L0803: 1, |
| | | | | | | | L0790: 1, H0672: 1, |
| | | | | | | | S0328: 1, L0779: 1 and |
| | | | | | | | S0260: 1. |
| | | 919899 | 134 | 3-977 | 278 | Cys-49 to Leu-55, | |
| | | | | | | Glu-62 to Glu-68, | |
| | | | | | | Phe-100 to Lys-106, | |
| | | | | | | Pro-122 to Gln-127, | |
| | | | | | | Leu-219 to Gly-225, | |
| | | | | | | Gly-273 to Gly-281. | |
| | | 947085 | 135 | 2-967 | 279 | Cys-46 to Leu-52, | |
| | | | | | | Glu-59 to Glu-65. | |
| 54 | HISBG28 | 1180262 | 64 | 1-1296 | 208 | Pro-47 to Ala-58, | AR061: 0, AR089: 0 |
| | | | | | | Tyr-61 to Thr-67, | L0766: 10, L0779: 3, |
| | | | | | | Glu-86 to Ser-92, | L0759: 2, S0114: 1, |
| | | | | | | Tyr-125 to Phe-132, | S0116: 1, H0431: 1, |
| | | | | | | Asp-145 to Gln-151, | H0013: 1, H0251: 1, |
| | | | | | | Glu-211 to Tyr-219, | H0628: 1, H0646: 1, |
| | | | | | | Leu-312 to Glu-319, | L0761: 1, L0662: 1, |
| | | | | | | Ile-331 to Tyr-337, | L0776: 1, L0665: 1, |
| | | | | | | Ser-381 to Thr-389, | H0702: 1, H0520: 1, |
| | | | | | | Gly-396 to His-403. | H0539: 1, L0749: 1, |
| | | | | | | | L0750: 1, H0444: 1, |
| | | | | | | | H0445: 1 and H0543: 1. |
| | | 920850 | 136 | 184-816 | 280 | Leu-91 to Glu-98, | |
| | | | | | | Ile-110 to Tyr-116, | |
| | | | | | | Ser-160 to Thr-168, | |
| | | | | | | Gly-175 to His-182. | |
| 55 | HBJIG82 | 1151379 | 65 | 1-432 | 209 | Phe-42 to Arg-48, | AR089: 26, AR061: 15 |
| | | | | | | Ser-91 to Lys-108, | S0010: 1 and H0318: 1. |
| | | | | | | Gln-115 to Gln-122, | |
| | | | | | | Ser-135 to His-141. | |
| | | 924605 | 137 | 3-1010 | 281 | Phe-39 to Arg-45. | |
| 56 | HBMXS88 | 1162642 | 66 | 281-1357 | 210 | Glu-77 to Asn-82, | AR089: 2, AR061: 2 |
| | | | | | | Ser-125 to Gly-130, | L0766: 7, L0749: 5, |
| | | | | | | Gln-144 to Lys-153, | L0770: 3, L0747: 3, |
| | | | | | | Asp-173 to Ser-180, | H0650: 2, S0116: 2, |
| | | | | | | Leu-191 to Glu-197, | H0039: 2, H0622: 2, |
| | | | | | | Glu-201 to Phe-209, | H0264: 2, H0059: 2, |
| | | | | | | Ser-264 to Pro-269, | L0794: 2, L0804: 2, |
| | | | | | | Phe-282 to Ala-287, | L0805: 2, L0776: 2, |
| | | | | | | Leu-318 to Ala-325, | L0439: 2, L0752: 2, |
| | | | | | | Lys-340 to Thr-350. | L0731: 2, L0759: 2, |
| | | | | | | | H0624: 1, H0170: 1, |
| | | | | | | | H0656: 1, S0045: 1, |
| | | | | | | | S0222: 1, H0575: 1, |
| | | | | | | | T0082: 1, H0545: 1, |
| | | | | | | | H0373: 1, S0024: 1, |
| | | | | | | | H0252: 1, H0428: 1, |
| | | | | | | | H0674: 1, H0090: 1, |
| | | | | | | | H0616: 1, H0551: 1, |
| | | | | | | | L0772: 1, L0646: 1, |
| | | | | | | | L0641: 1, L0375: 1, |
| | | | | | | | L0806: 1, L0657: 1, |
| | | | | | | | L0789: 1, L0665: 1, |
| | | | | | | | H0547: 1, H0659: 1, |
| | | | | | | | H0521: 1, L0748: 1, |
| | | | | | | | L0757: 1, L0758: 1, |
| | | | | | | | S0026: 1, H0667: 1 and |
| | | | | | | | S0424: 1. |
| | | 926722 | 138 | 3-545 | 282 | | |
| 57 | HE8UL90 | 1226071 | 67 | 475-2286 | 211 | Gly-27 to Asp-34, | AR061: 4, AR050: 3, |
| | | | | | | Cys-109 to Ser-118, | AR054: 1, AR089: 1, |
| | | | | | | Asp-129 to Gly-140, | AR051: 1 |
| | | | | | | Pro-159 to Cys-175, | H0013: 1 |
| | | | | | | Glu-192 to Glu-203, | |
| | | | | | | Ser-208 to Gly-214, | |
| | | | | | | Glu-246 to Cys-262, | |
| | | | | | | Leu-265 to Cys-271, | |
| | | | | | | Pro-274 to Ser-289, | |
| | | | | | | Asn-411 to Glu-416, | |
| | | | | | | Cys-520 to Arg-536, | |
| | | | | | | Tyr-544 to His-549, | |
| | | | | | | Met-572 to Thr-579, | |
| | | | | | | Lys-591 to Thr-596. | |
| | | 942749 | 139 | 3-641 | 283 | | |
| 58 | HWHGF95 | 1152274 | 68 | 1-753 | 212 | Glu-29 to Trp-37, | AR050: 3, AR061: 2, |
| | | | | | | Trp-80 to Gln-87, | AR054: 2, AR089: 1, |
| | | | | | | Pro-98 to Asp-112, | AR051: 0 |
| | | | | | | Glu-195 to Gly-206, | H0586: 1 and L0376: |
| | | | | | | Pro-225 to Ala-233. | 1. |
| | | 947019 | 140 | 2-742 | 284 | Glu-25 to Trp-33, | |
| | | | | | | Trp-76 to Gln-83, | |
| | | | | | | Pro-94 to Asp-108. | |
| 59 | HNKAZ51 | 1152347 | 69 | 1-879 | 213 | Gln-80 to Gln-86, | AR050: 2, AR061: 1, |
| | | | | | | Gln-105 to Gln-112, | AR089: 0, AR054: 0, |
| | | | | | | Gly-192 to Gln-200, | AR051: 0 |
| | | | | | | Pro-215 to Ile-222, | L0015: 1 and S0330: 1. |
| | | | | | | Gly-265 to Gly-275. | |
| | | 947067 | 141 | 31-612 | 285 | Arg-11 to Arg-18, | |
| | | | | | | Gln-96 to Gln-102, | |
| | | | | | | Gln-121 to Gln-128. | |
| 60 | HFKKE19 | 1127465 | 70 | 580-2 | 214 | Ser-25 to Ser-30, | AR061: 6, AR089: 4 |
| | | | | | | Leu-56 to Pro-63, | H0620: 2, H0539: 2, |
| | | | | | | Gln-138 to Gly-158. | H0619: 1 and L0666: 1. |
| | | 947418 | 142 | 1-288 | 286 | Pro-18 to Met-23, | |
| | | | | | | Asp-65 to Glu-70, | |
| | | | | | | Pro-81 to Pro-88. | |
| 61 | HILBH66 | 1048931 | 71 | 2-439 | 215 | Arg-1 to Trp-12, | AR061: 19, AR089: 11 |
| | | | | | | Ser-35 to Cys-40, | L0794: 10, L0803: 6, |
| | | | | | | Ala-72 to Thr-77, | L0777: 6, L0758: 5, |
| | | | | | | Phe-118 to Gln-124, | L0747: 4, L0770: 3, |
| | | | | | | Asn-140 to Asn-146. | L0809: 3, L0666: 3, |
| | | | | | | | L0759: 3, L0763: 2, |
| | | | | | | | L0804: 2, L0783: 2, |
| | | | | | | | H0659: 2, L0749: 2, |
| | | | | | | | L0750: 2, L0779: 2, |
| | | | | | | | T0002: 1, H0686: 1, |
| | | | | | | | S0116: 1, H0483: 1, |
| | | | | | | | H0486: 1, L0471: 1, |
| | | | | | | | S0388: 1, H0083: 1, |
| | | | | | | | H0535: 1, H0646: 1, |
| | | | | | | | S0002: 1, L0761: 1, |
| | | | | | | | L0800: 1, L0764: 1, |
| | | | | | | | L0766: 1, L0775: 1, |
| | | | | | | | L0655: 1, L0518: 1, |
| | | | | | | | L0787: 1, S0374: 1, |
| | | | | | | | H0651: 1, L0748: 1, |
| | | | | | | | L0731: 1 and S0242: 1. |
| | | 948844 | 143 | 1-438 | 287 | Gly-3 to Trp-12, | |
| | | | | | | Ser-35 to Cys-40, | |
| | | | | | | Ala-72 to Thr-77, | |
| | | | | | | Phe-118 to Gln-124, | |
| | | | | | | Asn-140 to Asn-146. | |
| 62 | HWMEQ37 | 1226808 | 72 | 97-1659 | 216 | Leu-29 to Pro-47, | AR089: 5, AR061: 2 |
| | | | | | | Pro-55 to Arg-60, | S0356: 1, S0354: 1, |
| | | | | | | Pro-99 to Gly-106. | S0358: 1, S0376: 1, |
| | | | | | | | H0620: 1, H0023: 1, |
| | | | | | | | H0039: 1 and H0593: 1. |
| | | 949568 | 144 | 97-867 | 288 | Leu-29 to Pro-47, | |
| | | | | | | Pro-55 to Arg-60, | |
| | | | | | | Pro-99 to Gly-106, | |
| | | | | | | Met-170 to Thr-177, | |
| | | | | | | Glu-196 to Ser-207. | |
| 63 | HFKHD91 | 1165344 | 73 | 476-3 | 217 | Pro-44 to Trp-62, | AR054: 16, AR051: 8, |
| | | | | | | Arg-120 to Asp-128. | AR050: 6, AR061: 4, |
| | | | | | | | AR089: 1 |
| | | | | | | | L0747: 2, H0624: 1, |
| | | | | | | | H0171: 1, S6016: 1, |
| | | | | | | | H0620: 1, L0666: 1, |
| | | | | | | | L0665: 1 and L0777: 1. |
| | | 951259 | 145 | 2-460 | 289 | Gly-1 to Trp-12. | |
| | | 951259 | 145 | 2-460 | 289 | Gly-1 to Trp-12. | |
| 64 | HUSXE73 | 1127979 | 74 | 3-863 | 218 | Gly-43 to Arg-57, | AR089: 21, AR061: 9 |
| | | | | | | Pro-104 to Gly-111, | L0794: 11, L0803: 5, |
| | | | | | | Pro-124 to Cys-131, | L0747: 5, L0750: 5, |
| | | | | | | Gln-133 to Arg-138, | H0618: 4, L0789: 4, |
| | | | | | | Pro-140 to Gly-161, | L0754: 4, L0749: 4, |
| | | | | | | Lys-211 to Ser-219, | H0625: 3, L0804: 3, |
| | | | | | | Ser-282 to Ser-287. | L0809: 3, L0731: 3, |
| | | | | | | | S0046: 2, H0333: 2, |
| | | | | | | | H0553: 2, H0509: 2, |
| | | | | | | | L0659: 2, L0663: 2, |
| | | | | | | | L0743: 2, L0777: 2, |
| | | | | | | | L0755: 2, H0255: 1, |
| | | | | | | | H0662: 1, S0045: 1, |
| | | | | | | | S0222: 1, H0497: 1, |
| | | | | | | | H0486: 1, S0280: 1, |
| | | | | | | | H0309: 1, H0150: 1, |
| | | | | | | | H0081: 1, T0003: 1, |
| | | | | | | | H0083: 1, H0510: 1, |
| | | | | | | | H0266: 1, H0622: 1, |
| | | | | | | | H0424: 1, S0366: 1, |
| | | | | | | | H0135: 1, H0412: 1, |
| | | | | | | | H0413: 1, S0472: 1, |
| | | | | | | | H0649: 1, L0770: 1, |
| | | | | | | | L0646: 1, L0768: 1, |
| | | | | | | | L0774: 1, L0775: 1, |
| | | | | | | | L0666: 1, S0378: 1, |
| | | | | | | | S0380: 1, L0758: 1 and |
| | | | | | | | L0759: 1. |
| | | 953246 | 146 | 1-864 | 290 | Gly-44 to Arg-58, | |
| | | | | | | Pro-105 to Gly-112, | |
| | | | | | | Pro-125 to Cys-132, | |
| | | | | | | Gln-134 to Arg-139, | |
| | | | | | | Pro-141 to Gly-162, | |
| | | | | | | Lys-212 to Ser-220, | |
| | | | | | | Ser-283 to Ser-288. | |
| 65 | HNFCS26 | 899406 | 75 | 2-994 | 219 | Cys-40 to Asn-46, | AR054: 17, AR051: |
| | | | | | | Gln-283 to Trp-291, | 12, AR050: 9, AR061: |
| | | | | | | Ser-298 to Tyr-305, | 4, AR089: 1 |
| | | | | | | Leu-307 to Gly-320, | H0271: 6, H0556: 5, |
| | | | | | | Gln-326 to Tyr-331. | L0748: 5, L0803: 4, |
| | | | | | | | H0411: 3, H0586: 3, |
| | | | | | | | H0036: 3, L0666: 3, |
| | | | | | | | H0222: 2, S0212: 2, |
| | | | | | | | H0075: 2, H0575: 2, |
| | | | | | | | H0046: 2, H0071: 2, |
| | | | | | | | S0003: 2, H0615: 2, |
| | | | | | | | L0483: 2, H0623: 2, |
| | | | | | | | H0494: 2, L0659: 2, |
| | | | | | | | L0565: 2, S0380: 2, |
| | | | | | | | H0521: 2, L0740: 2, |
| | | | | | | | L0731: 2, S0194: 2, |
| | | | | | | | H0265: 1, S0418: 1, |
| | | | | | | | H0580: 1, H0587: 1, |
| | | | | | | | H0069: 1, H0427: 1, |
| | | | | | | | H0599: 1, H0004: 1, |
| | | | | | | | H0581: 1, T0115: 1, |
| | | | | | | | H0024: 1, S0362: 1, |
| | | | | | | | H0355: 1, H0375: 1, |
| | | | | | | | H0266: 1, H0687: 1, |
| | | | | | | | H0028: 1, S0250: 1, |
| | | | | | | | H0252: 1, H0328: 1, |
| | | | | | | | L0055: 1, H0212: 1, |
| | | | | | | | H0598: 1, H0056: 1, |
| | | | | | | | H0132: 1, H0647: 1, |
| | | | | | | | S0142: 1, H0529: 1, |
| | | | | | | | L0369: 1, L0372: 1, |
| | | | | | | | L0646: 1, L0773: 1, |
| | | | | | | | L0774: 1, L0607: 1, |
| | | | | | | | L0515: 1, L0788: 1, |
| | | | | | | | L0665: 1, H0144: 1, |
| | | | | | | | H0702: 1, S0126: 1, |
| | | | | | | | H0689: 1, H0690: 1, |
| | | | | | | | H0684: 1, H0435: 1, |
| | | | | | | | S0328: 1, S0378: 1, |
| | | | | | | | H0478: 1, H0626: 1, |
| | | | | | | | S3012: 1, S0027: 1, |
| | | | | | | | S0028: 1, S0206: 1, |
| | | | | | | | L0608: 1, S0192: 1 and |
| | | | | | | | H0543: 1. |
| | | 956682 | 147 | 2-421 | 291 | Cys-42 to Asn-48, | |
| | | | | | | Arg-77 to Ser-87. | |
| | | 956683 | 148 | 160-414 | 292 | Arg-1 to Glu-8. | |
| | | 956684 | 149 | 2239-1151 | 293 | Asp-15 to Gln-22, | |
| | | | | | | Gln-42 to Lys-50, | |
| | | | | | | Thr-61 to Gly-74, | |
| | | | | | | Asn-86 to Pro-93, | |
| | | | | | | Ser-124 to Leu-152, | |
| | | | | | | Thr-171 to Ile-177, | |
| | | | | | | Leu-197 to Lys-203, | |
| | | | | | | Asn-222 to Thr-229, | |
| | | | | | | Gly-249 to Pro-254. | |
| 66 | HCE3H08 | 959861 | 76 | 24-713 | 220 | Ala-17 to Pro-24, | AR061: 2, AR089: 2 |
| | | | | | | Pro-34 to Pro-48, | L0761: 10, H0599: 4, |
| | | | | | | Lys-55 to Lys-69, | L0438: 4, L0748: 4, |
| | | | | | | Ser-89 to Asp-94, | L0770: 3, L0766: 3, |
| | | | | | | Gly-102 to Gly-110, | L0740: 3, H0052: 2, |
| | | | | | | Glu-135 to Arg-142, | L0764: 2, L0659: 2, |
| | | | | | | Ile-163 to Glu-168, | S0053: 2, L0749: 2, |
| | | | | | | Ala-200 to Thr-205. | L0779: 2, L0752: 2, |
| | | | | | | | L0755: 2, L0757: 2, |
| | | | | | | | H0656: 1, S0212: 1, |
| | | | | | | | H0638: 1, S0420: 1, |
| | | | | | | | H0675: 1, H0393: 1, |
| | | | | | | | H0486: 1, H0318: 1, |
| | | | | | | | H0581: 1, H0251: 1, |
| | | | | | | | H0596: 1, H0009: 1, |
| | | | | | | | H0373: 1, H0428: 1, |
| | | | | | | | H0030: 1, H0644: 1, |
| | | | | | | | H0674: 1, H0623: 1, |
| | | | | | | | H0494: 1, H0560: 1, |
| | | | | | | | S0002: 1, L0769: 1, |
| | | | | | | | L0771: 1, L0774: 1, |
| | | | | | | | L0807: 1, L0515: 1, |
| | | | | | | | L0789: 1, L0790: 1, |
| | | | | | | | L0791: 1, L0792: 1, |
| | | | | | | | L0666: 1, S0216: 1, |
| | | | | | | | S0374: 1, H0547: 1, |
| | | | | | | | H0519: 1, S0126: 1, |
| | | | | | | | H0660: 1, S0044: 1, |
| | | | | | | | L0754: 1, L0756: 1, |
| | | | | | | | L0758: 1, S0196: 1 and |
| | | | | | | | H0542: 1. |
| 67 | HETKR83 | 1225819 | 77 | 52-1488 | 221 | Pro-15 to Arg-20, | AR089: 2, AR061: 2 |
| | | | | | | Arg-25 to Leu-30, | H0046: 44, H0135: 11, |
| | | | | | | Gln-53 to Trp-68, | H0539: 10, L0455: 7, |
| | | | | | | Glu-71 to Arg-76, | S0010: 3, L0456: 3, |
| | | | | | | Ala-81 to Gly-93, | L0750: 3, L0663: 2, |
| | | | | | | Gly-129 to Glu-134, | L0746: 2, L0747: 2, |
| | | | | | | Arg-171 to Arg-176, | L0779: 2, L0777: 2, |
| | | | | | | Thr-276 to Cys-282, | H0624: 1, S0116: 1, |
| | | | | | | Gly-284 to Glu-299, | H0208: 1, L0717: 1, |
| | | | | | | Lys-377 to Lys-387, | H0549: 1, H0333: 1, |
| | | | | | | Ser-392 to Cys-405, | H0013: 1, S0346: 1, |
| | | | | | | Gly-418 to Tyr-441. | L0157: 1, T0006: 1, |
| | | | | | | | H0652: 1, L0666: 1, |
| | | | | | | | H0144: 1, S0328: 1, |
| | | | | | | | H0696: 1 and L0439: 1. |
| | | 963274 | 150 | 2-445 | 294 | His-2 to Cys-15, | |
| | | | | | | Lys-46 to Lys-56, | |
| | | | | | | Ser-61 to Cys-74, | |
| | | | | | | Gly-87 to Tyr-110, | |
| | | | | | | Gln-127 to Tyr-146. | |
| 68 | HCUAZ04 | 1207329 | 78 | 575-276 | 222 | Ala-1 to Tyr-10, | AR089: 1, AR061: 0 |
| | | | | | | Arg-42 to Val-48, | L0769: 8, L0748: 4, |
| | | | | | | Glu-84 to Gly-98. | L0759: 4, H0038: 3, |
| | | | | | | | L0750: 3, L0755: 3, |
| | | | | | | | H0556: 2, S0356: 2, |
| | | | | | | | H0574: 2, L0163: 2, |
| | | | | | | | L0766: 2, L0776: 2, |
| | | | | | | | L0663: 2, L0752: 2, |
| | | | | | | | L0731: 2, L0599: 2, |
| | | | | | | | H0255: 1, H0306: 1, |
| | | | | | | | H0125: 1, S0376: 1, |
| | | | | | | | H0580: 1, H0455: 1, |
| | | | | | | | H0497: 1, H0331: 1, |
| | | | | | | | L0021: 1, H0004: 1, |
| | | | | | | | H0618: 1, S0010: 1, |
| | | | | | | | H0546: 1, H0545: 1, |
| | | | | | | | H0123: 1, H0081: 1, |
| | | | | | | | H0578: 1, H0051: 1, |
| | | | | | | | H0510: 1, H0188: 1, |
| | | | | | | | H0617: 1, H0032: 1, |
| | | | | | | | H0169: 1, T0042: 1, |
| | | | | | | | L0475: 1, H0560: 1, |
| | | | | | | | H0132: 1, L0770: 1, |
| | | | | | | | L0372: 1, L0764: 1, |
| | | | | | | | L0771: 1, L0774: 1, |
| | | | | | | | L0783: 1, L0665: 1, |
| | | | | | | | L0438: 1, S0028: 1, |
| | | | | | | | L0439: 1, L0740: 1, |
| | | | | | | | L0786: 1, L0779: 1, |
| | | | | | | | L0757: 1, L0758: 1, |
| | | | | | | | L0588: 1, L0605: 1, |
| | | | | | | | S0192: 1 and S0276: 1. |
| | | 965585 | 151 | 546-214 | 295 | Lys-6 to Phe-11. | |
| 69 | HCE3J83 | 968823 | 79 | 161-553 | 223 | Asn-6 to Asp-15, | AR089: 4, AR061: 3 |
| | | | | | | Glu-77 to Arg-83. | H0266: 3, H0031: 2, |
| | | | | | | | H0519: 2, L0591: 2, |
| | | | | | | | L0593: 2, H0650: 1, |
| | | | | | | | S0116: 1, S0468: 1, |
| | | | | | | | H0393: 1, H0013: 1, |
| | | | | | | | H0052: 1, T0110: 1, |
| | | | | | | | H0050: 1, H0271: 1, |
| | | | | | | | H0038: 1, H0412: 1, |
| | | | | | | | T0041: 1, T0042: 1, |
| | | | | | | | H0494: 1, L0475: 1, |
| | | | | | | | S0150: 1, L0791: 1, |
| | | | | | | | H0631: 1 and L0759: 1. |
| 70 | HAPOI67 | 971184 | 80 | 1-1983 | 224 | Asp-4 to Gln-11, | AR054: 10, AR061: 6, |
| | | | | | | Gln-31 to Lys-39, | AR051: 3, AR050: 3, |
| | | | | | | Thr-50 to Gly-63, | AR089: 1 |
| | | | | | | Asn-75 to Pro-82, | L0768: 3, H0670: 3, |
| | | | | | | Ser-113 to Leu-141, | L0731: 3, L0759: 3, |
| | | | | | | Thr-160 to Ile-166, | S0192: 3, H0657: 2, |
| | | | | | | Leu-186 to Lys-192, | H0013: 2, H0271: 2, |
| | | | | | | Asn-211 to Thr-218, | S0003: 2, L0766: 2, |
| | | | | | | Glu-265 to Asp-270, | L0666: 2, L0747: 2, |
| | | | | | | Lys-317 to Gly-329, | L0749: 2, L0752: 2, |
| | | | | | | Gln-613 to Trp-621, | H0686: 1, S0114: 1, |
| | | | | | | Ser-628 to Tyr-635, | S0356: 1, S0358: 1, |
| | | | | | | Leu-637 to Gly-650, | S0360: 1, H0580: 1, |
| | | | | | | Gln-656 to Tyr-661. | S0132: 1, H0331: 1, |
| | | | | | | | L0021: 1, H0042: 1, |
| | | | | | | | H0575: 1, H0050: 1, |
| | | | | | | | H0024: 1, H0355: 1, |
| | | | | | | | H0375: 1, H0059: 1, |
| | | | | | | | H0633: 1, S0142: 1, |
| | | | | | | | S0210: 1, L0770: 1, |
| | | | | | | | L0667: 1, L0662: 1, |
| | | | | | | | L0804: 1, L0775: 1, |
| | | | | | | | L0776: 1, L0661: 1, |
| | | | | | | | L0809: 1, S0374: 1, |
| | | | | | | | H0519: 1, S0126: 1, |
| | | | | | | | H0660: 1, H0521: 1, |
| | | | | | | | S0044: 1, H0576: 1, |
| | | | | | | | L0748: 1, L0756: 1, |
| | | | | | | | L0596: 1, L0590: 1, |
| | | | | | | | L0592: 1, L0601: 1 and |
| | | | | | | | S0242: 1. |
| 71 | HE8NI05 | 1216548 | 81 | 3-1436 | 225 | Cys-7 to Trp-18, | AR051: 25, AR054: 9, |
| | | | | | | Pro-21 to Asn-28, | AR050: 3, AR061: 3, |
| | | | | | | Met-31 to Arg-41, | AR089: 1 |
| | | | | | | Pro-47 to His-57, | L0666: 3, L0776: 2, |
| | | | | | | Pro-59 to Asn-66, | L0750: 2, S0222: 1, |
| | | | | | | Pro-72 to Cys-82, | H0497: 1, H0013: 1, |
| | | | | | | Asp-90 to Asn-103, | H0009: 1, S0214: 1, |
| | | | | | | Arg-161 to Tyr-168, | H0124: 1, H0090: 1, |
| | | | | | | Arg-217 to Trp-222, | L0792: 1, H0547: 1, |
| | | | | | | Arg-230 to Gly-235, | H0519: 1, H0659: 1, |
| | | | | | | Gln-251 to His-261, | L0777: 1, L0758: 1, |
| | | | | | | Glu-270 to Asp-282, | L0589: 1 and L0608: 1. |
| | | | | | | Ser-314 to Gly-322, | |
| | | | | | | Ala-324 to Asp-329, | |
| | | | | | | Ser-367 to Asn-381, | |
| | | | | | | Val-383 to Asp-391, | |
| | | | | | | Asp-400 to Ser-411, | |
| | | | | | | Ser-419 to Arg-447, | |
| | | | | | | Leu-465 to Asp-472. | |
| | | 971303 | 152 | 73-609 | 296 | | |
| 72 | HHENW06 | 1040263 | 82 | 1123-2208 | 226 | Pro-10 to Gly-23, | AR050: 83, AR051: |
| | | | | | | Ala-31 to Gly-37, | 81, AR054: 70, AR089: |
| | | | | | | Lys-68 to Tyr-76, | 1, AR061: 0 |
| | | | | | | Gln-82 to Asn-89, | H0549: 7, L0665: 6, |
| | | | | | | Val-109 to Tyr-117, | L0751: 6, L0439: 5, |
| | | | | | | Pro-124 to Cys-134, | H0620: 3, L0803: 3, |
| | | | | | | Gly-161 to Trp-171, | L0777: 3, L0601: 3, |
| | | | | | | Pro-175 to Cys-180, | H0483: 2, H0486: 2, |
| | | | | | | Pro-183 to Trp-198, | H0309: 2, L0774: 2, |
| | | | | | | Cys-221 to Gln-232, | L0657: 2, L0659: 2, |
| | | | | | | Arg-234 to Ser-243, | L0809: 2, L0666: 2, |
| | | | | | | Pro-246 to Asp-257, | L0438: 2, H0520: 2, |
| | | | | | | Lys-265 to Asp-278, | H0658: 2, L0602: 2, |
| | | | | | | Ala-348 to His-353. | H0555: 2, H0624: 1, |
| | | | | | | | H0686: 1, H0295: 1, |
| | | | | | | | H0656: 1, S0282: 1, |
| | | | | | | | H0255: 1, S0354: 1, |
| | | | | | | | H0580: 1, H0619: 1, |
| | | | | | | | H0618: 1, H0581: 1, |
| | | | | | | | S0049: 1, H0052: 1, |
| | | | | | | | H0562: 1, H0012: 1, |
| | | | | | | | H0083: 1, H0687: 1, |
| | | | | | | | S0250: 1, H0428: 1, |
| | | | | | | | L0483: 1, H0135: 1, |
| | | | | | | | S0038: 1, H0494: 1, |
| | | | | | | | L0640: 1, L0638: 1, |
| | | | | | | | L0637: 1, L0771: 1, |
| | | | | | | | L0662: 1, L0805: 1, |
| | | | | | | | L0655: 1, L0629: 1, |
| | | | | | | | L0368: 1, L0789: 1, |
| | | | | | | | L0663: 1, H0519: 1, |
| | | | | | | | H0593: 1, H0682: 1, |
| | | | | | | | H0670: 1, H0521: 1, |
| | | | | | | | H0522: 1, H0696: 1, |
| | | | | | | | L0740: 1, L0779: 1 and |
| | | | | | | | H0667: 1. |
| | | 971310 | 153 | 687-1271 | 297 | | |
| 73 | HNSMB24 | 971537 | 83 | 3-677 | 227 | Ser-15 to Tyr-24, | AR089: 34, AR061: 19 |
| | | | | | | Met-47 to Tyr-56, | L0664: 2, H0483: 1, |
| | | | | | | Gly-127 to Ser-133. | S0376: 1, L0762: 1, |
| | | | | | | | L0638: 1, L0771: 1, |
| | | | | | | | L0657: 1, L0783: 1, |
| | | | | | | | L0665: 1, H0658: 1, |
| | | | | | | | H0670: 1 and L0779: 1. |
| 74 | HLMDO77 | 974855 | 84 | 32-547 | 228 | | AR061: 6, AR089: 6, |
| | | | | | | | AR051: 3, AR050: 2, |
| | | | | | | | AR054: 1 |
| | | 974856 | 154 | 403-215 | 298 | Gly-1 to Cys-9, | |
| | | | | | | Pro-12 to Pro-36. | |

[0046] The first column in Table 1A provides the gene number in the application corresponding to the clone identifier. The second column in Table 1A provides a unique “Clone ID NO:Z” for a cDNA clone related to each contig sequence disclosed in Table 1A. This clone ID references the cDNA clone which contains at least the 5′ most sequence of the assembled contig and at least a portion of SEQ ID NO:X was determined by directly sequencing the referenced clone. The reference clone may have more sequence than described in the sequence listing or the clone may have less. In the vast majority of cases, however, the clone is believed to encode a full-length polypeptide. In the case where a clone is not full-length, a full-length cDNA can be obtained by methods described elsewhere herein.

[0047] The third column in Table 1A provides a unique “Contig ID” identification for each contig sequence. The fourth column provides the “SEQ ID NO:” identifier for each of the contig polynucleotide sequences disclosed in Table 1A. The fifth column, “ORF (From-To)”, provides the location (i.e., nucleotide position numbers) within the polynucleotide sequence “SEQ ID NO:X” that delineate the preferred open reading frame (ORF) shown in the sequence listing and referenced in Table 1A, column 6, as SEQ ID NO:Y. Where the nucleotide position number “To” is lower than the nucleotide position number “From”, the preferred ORF is the reverse complement of the referenced polynucleotide sequence.

[0048] The sixth column in Table 1A provides the corresponding SEQ ID NO:Y for the polypeptide sequence encoded by the preferred ORF delineated in column 5. In one embodiment, the invention provides an amino acid sequence comprising, or alternatively consisting of, a polypeptide encoded by the portion of SEQ ID NO:X delineated by “ORF (From-To)”. Also provided are polynucleotides encoding such amino acid sequences and the complementary strand thereto.

[0049] Column 7 in Table 1A lists residues comprising epitopes contained in the polypeptides encoded by the preferred ORF (SEQ ID NO:Y), as predicted using the algorithm of Jameson and Wolf, (1988) Comp. Appl. Biosci. 4:181-186. The Jameson-Wolf antigenic analysis was performed using the computer program PROTEAN (Version 3.11 for the Power MacIntosh, DNASTAR, Inc., 1228 South Park Street Madison, Wis.). In specific embodiments, polypeptides of the invention comprise, or alternatively consist of, at least one, two, three, four, five or more of the predicted epitopes as described in Table 1A. It will be appreciated that depending on the analytical criteria used to predict antigenic determinants, the exact address of the determinant may vary slightly.

[0050] Column 8 in Table 1A provides an expression profile and library code: count for each of the contig sequences (SEQ ID NO:X) disclosed in Table 1A, which can routinely be combined with the information provided in Table 4 and used to determine the tissues, cells, and/or cell line libraries which predominantly express the polynucleotides of the invention. The first number in column 8 (preceding the colon), represents the tissue/cell source identifier code corresponding to the code and description provided in Table 4. For those identifier codes in which the first two letters are not “AR”, the second number in column 8 (following the colon) represents the number of times a sequence corresponding to the reference polynucleotide sequence was identified in the tissue/cell source. Those tissue/cell source identifier codes in which the first two letters are “AR” designate information generated using DNA array technology. Utilizing this technology, cDNAs were amplified by PCR and then transferred, in duplicate, onto the array. Gene expression was assayed through hybridization of first strand cDNA probes to the DNA array. CDNA probes were generated from total RNA extracted from a variety of different tissues and cell lines. Probe synthesis was performed in the presence of 33P dCTP, using oligo(dT) to prime reverse transcription. After hybridization, high stringency washing conditions were employed to remove non-specific hybrids from the array. The remaining signal, emanating from each gene target, was measured using a Phosphorimager. Gene expression was reported as Phosphor Stimulating Luminescence (PSL) which reflects the level of phosphor signal generated from the probe hybridized to each of the gene targets represented on the array. A local background signal subtraction was performed before the total signal generated from each array was used to normalize gene expression between the different hybridizations. The value presented after “[array code]:” represents the mean of the duplicate values, following background subtraction and probe normalization. One of skill in the art could routinely use this information to identify normal and/or diseased tissue(s) which show a predominant expression pattern of the corresponding polynucleotide of the invention or to identify polynucleotides which show predominant and/or specific tissue and/or cell expression.

[0051] Column 9 in Table 1A provides a chromosomal map location for certain polynucleotides of the invention. Chromosomal location was determined by finding exact matches to EST and cDNA sequences contained in the NCBI (National Center for Biotechnology Information) UniGene database. Each sequence in the UniGene database is assigned to a “cluster”; all of the ESTs, cDNAs, and STSs in a cluster are believed to be derived from a single gene. Chromosomal mapping data is often available for one or more sequence(s) in a UniGene cluster; this data (if consistent) is then applied to the cluster as a whole. Thus, it is possible to infer the chromosomal location of a new polynucleotide sequence by determining its identity with a mapped UniGene cluster.

[0052] A modified version of the computer program BLASTN (Altshul et al., J. Mol. Biol. 215:403-410 (1990); and Gish and States, Nat. Genet. 3:266-272 (1993)) was used to search the UniGene database for EST or cDNA sequences that contain exact or near-exact matches to a polynucleotide sequence of the invention (the ‘Query’). A sequence from the UniGene database (the ‘Subject’) was said to be an exact match if it contained a segment of 50 nucleotides in length such that 48 of those nucleotides were in the same order as found in the Query sequence. If all of the matches that met this criteria were in the same UniGene cluster, and mapping data was available for this cluster, it is indicated in Table 1A under the heading “Cytologic Band”. Where a cluster had been further localized to a distinct cytologic band, that band is disclosed; where no banding information was available, but the gene had been localized to a single chromosome, the chromosome is disclosed.

[0053] Once a presumptive chromosomal location was determined for a polynucleotide of the invention, an associated disease locus was identified by comparison with a database of diseases which have been experimentally associated with genetic loci. The database used was the Morbid Map, derived from OMIM™ (supra). If the putative chromosomal location of a polynucleotide of the invention (Query sequence) was associated with a disease in the Morbid Map database, an OMIM reference identification number was noted in column 10, Table 1A, labelled “OMIM Disease Reference(s)”. Table 5 is a key to the OMIM reference identification numbers (column 1), and provides a description of the associated disease in Column 2.

TABLE 1B

| Clone ID | SEQ ID | CONTIG | BAC | SEQ ID | EXON |
|---|---|---|---|---|---|
| NO: Z | NO: X | ID: | ID: A | NO: B | From-To |
| HNGER43 | 15 | 699391 | AC023328 | 299 | 1-383 |
| HTKAA03 | 52 | 961002 | AC073152 | 300 | 1-465 |
| HTKAA03 | 52 | 961002 | AC073152 | 301 | 1-638 |
| HTTKB18 | 53 | 963346 | AC012186 | 302 | 1-101 |
| | | | | | 1432-1773 |
| | | | | | 2108-2234 |
| | | | | | 2755-2942 |
| | | | | | 4452-4677 |
| | | | | | 6207-6294 |
| | | | | | 6910-7030 |
| | | | | | 8184-8720 |
| | | | | | 8935-9043 |
| | | | | | 9126-9538 |
| | | | | | 9680-10164 |
| | | | | | 11135-11344 |
| | | | | | 11744-11906 |
| | | | | | 14393-14679 |
| | | | | | 20063-20220 |
| | | | | | 20444-20625 |
| | | | | | 20961-21364 |
| | | | | | 21744-21893 |
| | | | | | 22016-22076 |
| | | | | | 22652-22911 |
| | | | | | 22942-24288 |
| | | | | | 24334-25010 |
| | | | | | 25159-25619 |
| HFKJO15 | 61 | 910828 | AC005500 | 303 | 1-180 |
| | | | | | 288-509 |
| | | | | | 638-770 |
| | | | | | 1363-1466 |
| | | | | | 1541-1661 |
| | | | | | 1829-1971 |
| | | | | | 1988-2162 |
| | | | | | 3576-3797 |
| | | | | | 4349-4491 |
| | | | | | 4913-6610 |
| HFKJO15 | 61 | 910828 | AC007731 | 304 | 1-180 |
| | | | | | 288-509 |
| | | | | | 638-770 |
| | | | | | 1363-1466 |
| | | | | | 1541-1661 |
| | | | | | 1829-1971 |
| | | | | | 1988-2162 |
| | | | | | 3576-3797 |
| | | | | | 4349-4491 |
| | | | | | 4913-6610 |
| HFKJO15 | 61 | 910828 | AC005500 | 305 | 1-97 |
| | | | | | 305-602 |
| HFKJO15 | 61 | 910828 | AC007731 | 306 | 1-97 |
| | | | | | 305-602 |
| HCE3J83 | 79 | 968823 | AC015841 | 307 | 1-161 |
| HNSMB24 | 83 | 971537 | AC015555 | 308 | 1-61 |
| | | | | | 464-586 |
| | | | | | 752-1423 |
| | | | | | 3455-3587 |
| | | | | | 5766-5958 |
| | | | | | 6757-7115 |
| | | | | | 8075-8329 |
| | | | | | 8778-8876 |
| | | | | | 12309-12455 |
| | | | | | 13123-13279 |
| | | | | | 16212-17107 |
| HNSMB24 | 83 | 971537 | AP001623 | 309 | 1-61 |
| | | | | | 464-586 |
| | | | | | 752-1423 |
| | | | | | 3455-3580 |
| | | | | | 4976-5021 |
| | | | | | 5793-5958 |
| | | | | | 6757-7115 |
| | | | | | 8075-8329 |
| | | | | | 8778-8876 |
| | | | | | 12305-12451 |
| | | | | | 13119-13275 |
| | | | | | 16208-17104 |
| HNSMB24 | 83 | 971537 | AC015555 | 310 | 1-674 |
| HNSMB24 | 83 | 971537 | AP001623 | 311 | 1-674 |

[0054] Table 1B summarizes additional polynucteotides encompassed by the invention (including cDNA clones related to the sequences (Clone ID NO:Z), contig sequences (contig identifier (Contig ID:) contig nucleotide sequence identifiers (SEQ ID NO:X)), and genomic sequences (SEQ ID NO:B). The first column provides a unique clone identifier, “Clone ID NO:Z”, for a cDNA clone related to each contig sequence. The second column provides the sequence identifier, “SEQ ID NO:X”, for each contig sequence. The third column provides a unique contig identifier, “Contig ID:” for each contig sequence. The fourth column, provides a BAC identifier “BAC ID NO:A” for the BAC clone referenced in the corresponding row of the table. The fifth column provides the nucleotide sequence identifier, “SEQ ID NO:B” for a fragment of the BAC clone identified in column four of the corresponding row of the table. The sixth column, “Exon From-To”, provides the location (i.e., nucleotide position numbers) within the polynucleotide sequence of SEQ ID NO:B which delineate certain polynucleotides of the invention that are also exemplary members of polynucleotide sequences that encode polypeptides of the invention (e.g., polypeptides containing amino acid sequences encoded by the polynucleotide sequences delineated in column six, and fragments and variants thereof).

TABLE 2

| | | SEQ | | | | Score/ | | |
|---|---|---|---|---|---|---|---|---|
| Clone ID NO: | | ID | Analysis | | PFam/NR Accession | Percent | NT | NT |
| Z | Contig ID: | NO: X | Method | PFam/NR Description | Number | Identity | From | To |
| HPLBY29 | 509875 | 85 | HMMER | PFAM: Bacterial mutT | PF00293 | 4.49 | 284 | 138 |
| | | | 1.8 | protein | | | | |
| HOUEU57 | 531182 | 86 | HMMER | PFAM: Bacterial mutT | PF00293 | 4.52 | 105 | 149 |
| | | | 1.8 | protein | | | | |
| NHHFR39 | 576399 | 87 | HMMER | PFAM: Bacterial mutT | PF00293 | 4.45 | 237 | 284 |
| | | | 1.8 | protein | | | | |
| HFATE17 | 662491 | 88 | HMMER | PFAM: Bacterial mutT | PF00293 | 5.17 | 458 | 526 |
| | | | 1.8 | protein | | | | |
| HNGER43 | 699391 | 15 | HMMER | PFAM: Bacterial mutT | PF00293 | 3.79 | 151 | 195 |
| | | | 1.8 | protein | | | | |
| HWAAE95 | 789051 | 89 | HMMER | PFAM: EGF-like domain | PF00008 | 14.74 | 108 | 176 |
| | | | 1.8 | protein | | | | |
| HMSGL27 | 855759 | 90 | HMMER | PFAM: Bacterial mutT | PF00293 | 5.56 | 276 | 202 |
| | | | 1.8 | protein | | | | |
| HKIXB77 | 870018 | 91 | HMMER | PFAM: Bacterial mutT | PF00293 | 5.34 | 264 | 326 |
| | | | 1.8 | protein | | | | |
| HTNBM01 | 910705 | 92 | HMMER | PFAM: EGF-like domain | PF00008 | 18.51 | 232 | 339 |
| | | | 1.8 | | | | | |
| | | | blastx.2 | Low density lipoprotein | sp\|AAF70379\|AAF70379 | 96% | 7 | 366 |
| | | | | receptor related protein- | | 30% | 7 | 342 |
| | | | | deleted 1 | | 31% | 34 | 342 |
| | | | | | | 100% | 577 | 651 |
| | | | | | | 23% | 1 | 342 |
| | | | | | | 30% | 342 | 575 |
| | | | | | | 35% | 46 | 255 |
| | | | | | | 36% | 46 | 243 |
| | | | | | | 27% | 46 | 324 |
| | | | | | | 28% | 46 | 279 |
| | | | | | | 30% | 46 | 249 |
| | | | | | | 27% | 19 | 273 |
| | | | | | | 28% | 76 | 246 |
| | | | | | | 31% | 46 | 234 |
| | | | | | | 31% | 13 | 117 |
| | | | | | | 31% | 202 | 363 |
| | | | | | | 22% | 19 | 264 |
| | | | | | | 40% | 43 | 138 |
| | | | | | | 31% | 166 | 306 |
| | | | | | | 31% | 37 | 246 |
| | | | | | | 25% | 79 | 312 |
| | | | | | | 30% | 175 | 264 |
| | | | | | | 27% | 31 | 171 |
| | | | | | | 41% | 55 | 105 |
| | | | | | | 32% | 46 | 129 |
| | | | | | | 26% | 16 | 141 |
| HBJGT92 | 919507 | 93 | HMMER | PFAM: Bacterial mutT | PF00293 | 7.68 | 377 | 436 |
| | | | 1.8 | protein | | | | |
| HAGAT56 | 924588 | 94 | HMMER | PFAM: Bacterial mutT | PF00293 | 4.58 | 54 | 119 |
| | | | 1.8 | protein | | | | |
| HCFMG57 | 1205913 | 22 | blastx.14 | HYPOTHETICAL 135.2 | sp\|Q9Y4J9\|Q9Y4J9 | 62% | 2 | 208 |
| | | | | KDA PROTEIN. | | | | |
| HCFMG57 | 929803 | 95 | HMMER | PFAM: Bacterial mutT | PF00293 | 3.89 | 661 | 678 |
| | | | 1.8 | protein | | | | |
| HTEHS55 | 933264 | 96 | HMMER | PFAM: Bacterial mutT | PF00293 | 6.06 | 255 | 284 |
| | | | 1.8 | protein | 43% | 2547 | 2594 | |
| HMUBI13 | 1189811 | 24 | blastx.14 | isomerase like protein | gi\|5302783\|emb\|CAB | 51% | 298 | 828 |
| | | | | [Arabidopsis thaliana] | 46032.1\| | 62% | 835 | 945 |
| | | | | | | 50% | 73 | 132 |
| HMUBI13 | 937820 | 97 | HMMER | PFAM: | PF01557 | 288.8 | 327 | 830 |
| | | | 2.1.1 | Fumarylacetoacetate | | | | |
| | | | | (FAA) hydrolase family | | | | |
| | | | blastx.2 | Brain cDNA, clone | sp\|BAA95083\|BAA95083 | 87% | 237 | 899 |
| | | | | MNCb-4134. | | | | |
| HPCAO89 | 1137858 | 25 | blastx.14 | serpin [Equus caballus] | gi\|164241\|gb\|AAA97513.1\| | 45% | 93 | 596 |
| | | | | | | 47% | 612 | 1022 |
| HPCAO89 | 946913 | 98 | HMMER | PFAM: Serpins (serine | PF00079 | 53.12 | 94 | 309 |
| | | | 1.8 | protease inhibitors) | | | | |
| | | | blastx.2 | leupin [Homo sapiens] | emb\|CAA61420.1\| | 39% | 82 | 327 |
| | | | | | | 45% | 309 | 452 |
| HE2KN09 | 1163877 | 26 | blastx.14 | (AF095446) syndesmos | gi\|6855513\|gb\|AAF | 69% | 30 | 686 |
| | | | | [Gallus gallus] | 29566.1\|AF095446_1 | | | |
| HE2KN09 | 951647 | 99 | HMMER | PFAM: Bacterial mutT | PF00293 | 7.21 | 171 | 230 |
| | | | 1.8 | protein | | | | |
| | | | blastx.2 | Syndesmos. | sp\|AAF29S66\|AAF | 69% | 24 | 680 |
| | | | | | 29566 | | | |
| HCWGE12 | 967067 | 100 | HMMER | PFAM: Bacterial mutT | PF00293 | 4.04 | 214 | 288 |
| | | | 1.8 | protein | | | | |
| HCEPY32 | 530520 | 101 | HMMER | PFAM: Bacterial mutT | PF00293 | 5.18 | 245 | 313 |
| | | | 1.8 | protein | | | | |
| HSVCH37 | 558195 | 102 | HMMER | PFAM: 3′5′-cyclic | PF00233 | 30 | 18 | 98 |
| | | | 2.1.1 | nucleotide | | | | |
| | | | | phosphodiesterase | | | | |
| HOFNL18 | 666498 | 103 | HMMER | PFAM: Bacterial mutT | PF00293 | 4.34 | 286 | 345 |
| | | | 1.8 | protein | | | | |
| HTOCG37 | 708888 | 104 | HMMER | PFAM: 3′5′-cyclic | PF00233 | 65.1 | 42 | 215 |
| | | | 2.1.1 | nucleotide | | | | |
| | | | | phosphodiesterase | | | | |
| | | | blastx.2 | 3,5-cyclic-nucleotide | pir\|JE0293\|JE0293 | 100% | 6 | 203 |
| | | | | phosphodiesterase (EC | | 53% | 179 | 340 |
| | | | | 3.1.4.17) 8B, 1 | | | | |
| HTEOF80 | 847224 | 105 | HMMER | PFAM: EGF-like domain | PF00008 | 14.65 | 20 | 100 |
| | | | 1.8 | | | | | |
| | | | blastx.2 | Epidermal growth factor | sp\|AAF27812\|AAF | 96% | 11 | 106 |
| | | | | repeat containing protein. | 27812 | | | |
| HSLDP32 | 1182295 | 33 | blastx.14 | ZK688.3 protein | gi\|4062757\|dbj\|BAA | 100% | 389 | 3 |
| | | | | [Escherichia coli] | 36014.1\| | | | |
| HSLDP32 | 866241 | 106 | HMMER | PFAM: | PF01557 | 39.8 | 78 | 197 |
| | | | 2.1.1 | Fumarylacetoacetate | | | | |
| | | | | (FAA) hydrolase family | | | | |
| | | | blastx.2 | conserved hypothetical | pir\|G83604\|G83604 | 55% | 197 | 346 |
| | | | | protein PA0318 | | 40% | 12 | 188 |
| | | | | [imported] - Pseudomonas | | | | |
| | | | | aeruginosa (strain PAO1) | | | | |
| HAICQ62 | 1182256 | 34 | blastx.14 | (AF201831) FILl epsilon | gi\|6694390\|gb\|AAF | 62% | 138 | 503 |
| | | | | [Homo sapiens] | 25211.1\|AF201831_1 | 50% | 498 | 575 |
| HAICQ62 | 888225 | 107 | HMMER | PFAM: Interleukin-1 | PF00340 | 42.1 | 388 | 663 |
| | | | 2.1.1 | | | | | |
| HRDBE43 | 894862 | 35 | HMMER | PFAM: Laminin G | PF00054 | 195.2 | 191 | 580 |
| | | | 2.1.1 | domain | | | | |
| | | | blastx.2. | CG8403 PROTEIN. | sp\|Q9V7I4\|Q9V7I4 | 33% | 2 | 1288 |
| | | | | | | 37% | 35 | 823 |
| | | | | | | 36% | 764 | 1285 |
| | | | | | | 26% | 173 | 607 |
| | | | | | | 47% | 686 | 730 |
| HRDBE43 | 947966 | 108 | HMMER | PFAM: Laminin G | PF00054 | 102.93 | 1023 | 661 |
| | | | 1.8 | domain | | | | |
| | | | blastx.14 | perlecan [Mus musculus] | gi\|200296\|gb\|AAA | 46% | 963 | 640 |
| | | | | | 39911.1\| | 31% | 1627 | 1250 |
| | | | | | | 38% | 1624 | 1361 |
| | | | | | | 38% | 1630 | 1379 |
| | | | | | | 40% | 966 | 715 |
| | | | | | | 32% | 957 | 661 |
| | | | | | | 72% | 1696 | 1643 |
| | | | | | | 41% | 1203 | 1132 |
| | | | | | | 47% | 1840 | 1772 |
| | | | | | | 33% | 1182 | 1111 |
| | | | | | | 50% | 1242 | 1189 |
| | | | | | | 47% | 1834 | 1784 |
| | | | | | | 45% | 1867 | 1796 |
| | | | | | | 47% | 1864 | 1814 |
| | | | | | | 57% | 1182 | 1141 |
| | | | | | | 53% | 1834 | 1796 |
| | | | | | | 61% | 1020 | 982 |
| | | | | | | 44% | 1194 | 1141 |
| | | | | | | 50% | 1834 | 1793 |
| | | | | | | 63% | 1828 | 1796 |
| | | | | | | 66% | 1227 | 1201 |
| | | | | | | 53% | 1834 | 1796 |
| | | | | | | 46% | 1239 | 1201 |
| | | | | | | 47% | 1188 | 1138 |
| | | | | | | 31% | 1699 | 1643 |
| | | | | | | 40% | 1538 | 1494 |
| | | | | | | 66% | 1185 | 1159 |
| | | | | | | 54% | 1828 | 1796 |
| | | | | | | 45% | 1828 | 1796 |
| | | | | | | 60% | 1227 | 1198 |
| | | | | | | 27% | 1158 | 1060 |
| | | | | | | 42% | 1023 | 982 |
| HSSKD85 | 908141 | 36 | HMMER | PFAM: EGF-like domain | PF00008 | 129.2 | 812 | 910 |
| | | | 2.1.1 | | | | | |
| | | | blastx.2 | EGF repeat | pir\|T30176\|T30176 | 89% | 332 | 1006 |
| | | | | transmembrane protein - | | 40% | 356 | 787 |
| | | | | mouse | | 36% | 186 | 335 |
| HCRMV17 | 1180333 | 37 | blastx.14 | KIF3B protein [Mus | gi\|1060923\|dbj\|BAA | 72% | 579 | 1463 |
| | | | | musculus] | 05070.1\| | 98% | 4 | 330 |
| | | | | | | 100% | 445 | 531 |
| | | | | | | 42% | 457 | 513 |
| | | | | | | 50% | 445 | 468 |
| HCRMV17 | 910010 | 109 | HMMER | PFAM: Kinesin motor | PF00225 | 225.4 | 3 | 317 |
| | | | 2.1.1 | domain | | | | |
| | | | blastx.14 | KIF3B protein [Mus | gi\|1060923\|dbj\|BAA | 100% | 3 | 317 |
| | | | | musculus] | 05070.1\| | 63% | 432 | 614 |
| | | | | | | 42% | 444 | 500 |
| | | | | | | 50% | 432 | 455 |
| HFOXL77 | 1137799 | 38 | blastx.14 | Xotch protein [Xenopus | gi\|1364263\|gb\|AAB | 42% | 133 | 303 |
| | | | | laevis] | 02039.1\| | 62% | 190 | 285 |
| | | | | | | 50% | 178 | 285 |
| | | | | | | 50% | 133 | 234 |
| | | | | | | 42% | 190 | 303 |
| | | | | | | 46% | 190 | 285 |
| | | | | | | 53% | 193 | 270 |
| | | | | | | 46% | 190 | 285 |
| | | | | | | 41% | 178 | 270 |
| | | | | | | 46% | 193 | 282 |
| | | | | | | 43% | 193 | 303 |
| | | | | | | 41% | 169 | 285 |
| | | | | | | 38% | 178 | 303 |
| | | | | | | 52% | 193 | 267 |
| | | | | | | 41% | 193 | 285 |
| | | | | | | 50% | 193 | 270 |
| | | | | | | 42% | 193 | 270 |
| | | | | | | 40% | 193 | 282 |
| | | | | | | 76% | 133 | 171 |
| | | | | | | 38% | 133 | 210 |
| | | | | | | 52% | 266 | 334 |
| | | | | | | 60% | 290 | 334 |
| | | | | | | 32% | 217 | 300 |
| | | | | | | 53% | 133 | 171 |
| | | | | | | 33% | 133 | 204 |
| | | | | | | 57% | 293 | 334 |
| | | | | | | 53% | 293 | 334 |
| | | | | | | 50% | 133 | 168 |
| | | | | | | 50% | 133 | 168 |
| | | | | | | 42% | 293 | 334 |
| | | | | | | 66% | 142 | 168 |
| | | | | | | 54% | 305 | 337 |
| | | | | | | 75% | 247 | 270 |
| | | | | | | 29% | 266 | 337 |
| | | | | | | 50% | 133 | 168 |
| | | | | | | 50% | 133 | 168 |
| | | | | | | 50% | 133 | 168 |
| | | | | | | 29% | 133 | 204 |
| | | | | | | 50% | 133 | 168 |
| | | | | | | 50% | 133 | 168 |
| | | | | | | 50% | 305 | 334 |
| | | | | | | 38% | 133 | 171 |
| | | | | | | 45% | 302 | 334 |
| | | | | | | 29% | 133 | 204 |
| | | | | | | 66% | 308 | 334 |
| | | | | | | 45% | 302 | 334 |
| | | | | | | 62% | 133 | 156 |
| | | | | | | 41% | 133 | 168 |
| | | | | | | 38% | 133 | 171 |
| | | | | | | 45% | 299 | 331 |
| | | | | | | 35% | 293 | 334 |
| | | | | | | 40% | 302 | 346 |
| | | | | | | 42% | 229 | 270 |
| | | | | | | 55% | 308 | 334 |
| | | | | | | 50% | 148 | 171 |
| | | | | | | 26% | 133 | 201 |
| | | | | | | 50% | 226 | 255 |
| | | | | | | 50% | 302 | 337 |
| HFOXL77 | 910698 | 110 | HMMER | PFAM: EGF-like domain | PF00008 | 51 | 285 | 386 |
| | | | 2.1.1 | | | | | |
| | | | blastx.2 | CELL SURFACE | sp\|O35516\|O35516 | 43% | 285 | 485 |
| | | | | PROTEIN. | | 45% | 285 | 488 |
| | | | | | | 41% | 285 | 485 |
| | | | | | | 48% | 285 | 482 |
| | | | | | | 40% | 285 | 485 |
| | | | | | | 43% | 285 | 488 |
| | | | | | | 38% | 285 | 485 |
| | | | | | | 42% | 300 | 488 |
| | | | | | | 44% | 285 | 485 |
| | | | | | | 39% | 285 | 482 |
| | | | | | | 43% | 285 | 485 |
| | | | | | | 37% | 285 | 485 |
| | | | | | | 40% | 285 | 485 |
| | | | | | | 46% | 285 | 473 |
| | | | | | | 38% | 285 | 485 |
| | | | | | | 35% | 285 | 485 |
| | | | | | | 31% | 285 | 512 |
| | | | | | | 36% | 294 | 482 |
| | | | | | | 38% | 285 | 488 |
| | | | | | | 52% | 143 | 193 |
| HBXCZ29 | 910842 | 111 | HMMER | PFAM: EGF-like domain | PF00008 | 32.85 | 608 | 718 |
| | | | 1.8 | | | | | |
| | | | blastx.2 | Low density lipoprotein | sp\|AAF70379\|AAF70379 | 83% | 410 | 805 |
| | | | | receptor related protein- | | 96% | 2 | 319 |
| | | | | deleted 1 | | 32% | 527 | 802 |
| | | | | | | 30% | 2 | 292 |
| | | | | | | 33% | 5 | 487 |
| | | | | | | 29% | 527 | 802 |
| | | | | | | 35% | 17 | 250 |
| | | | | | | 27% | 8 | 316 |
| | | | | | | 52% | 276 | 464 |
| | | | | | | 30% | 17 | 283 |
| | | | | | | 28% | 380 | 718 |
| | | | | | | 32% | 5 | 256 |
| | | | | | | 33% | 5 | 244 |
| | | | | | | 29% | 527 | 811 |
| | | | | | | 26% | 17 | 298 |
| | | | | | | 33% | 17 | 232 |
| | | | | | | 35% | 17 | 247 |
| | | | | | | 32% | 17 | 223 |
| | | | | | | 32% | 53 | 253 |
| | | | | | | 28% | 11 | 250 |
| | | | | | | 65% | 376 | 453 |
| | | | | | | 35% | 5 | 130 |
| | | | | | | 26% | 8 | 271 |
| | | | | | | 33% | 32 | 130 |
| | | | | | | 32% | 17 | 136 |
| | | | | | | 27% | 11 | 250 |
| | | | | | | 24% | 5 | 289 |
| | | | | | | 23% | 17 | 214 |
| | | | | | | 27% | 2 | 184 |
| | | | | | | 29% | 17 | 223 |
| | | | | | | 40% | 56 | 130 |
| | | | | | | 20% | 35 | 250 |
| | | | | | | 25% | 416 | 778 |
| | | | | | | 30% | 83 | 208 |
| | | | | | | 32% | 524 | 703 |
| | | | | | | 46% | 419 | 487 |
| | | | | | | 38% | 65 | 172 |
| | | | | | | 30% | 708 | 836 |
| | | | | | | 40% | 617 | 703 |
| | | | | | | 45% | 416 | 472 |
| HRDBJ38 | 917583 | 112 | HMMER | PFAM: Trypsin | PF00089 | 48.9 | 20 | 523 |
| | | | 2.1.1 | | | | | |
| | | | blastx.2 | SERINE PROTEASE | sp\|O97658\|O97658 | 62% | 23 | 856 |
| | | | | (FRAGMENT). | | | | |
| HCOKA10 | 907080 | 41 | HMMER | PFAM: Ribosomal protein | PF01199 | 229.8 | 509 | 213 |
| | | | 2.1.1 | L34e | | | | |
| | | | blastx.2 | ribosomal protein L34 | gb\|AAC41916.1\| | 98% | 521 | 216 |
| | | | | [Homo sapiens] | | | | |
| HCOKA10 | 918918 | 113 | HMMER | PFAM: Small cytokines | PF00048 | 124.2 | 1447 | 1238 |
| | | | 2.1.1 | (intecrine/chemokine), | | | | |
| | | | | interleukin-8 like | | | | |
| | | | blastx.14 | granulocyte chemotactic | pir\|B54188\|B54188 | 100% | 1444 | 1223 |
| | | | | protein, GCP-2 - bovine | | | | |
| HCOKA10 | 919869 | 114 | HMMER | PFAM: Small cytokines | PF00048 | 124.2 | 169 | 378 |
| | | | 2.1.1 | (intecrine/chemokine), | | | | |
| | | | | interleukin-8 like | | | | |
| HKGDI91 | 1137801 | 42 | blastx.14 | (AB013440) D113 protein | gi\|3721842\|dbj\|BAA | 92% | 180 | 404 |
| | | | | [Mus musculus] | 33716.1\| | 40% | 168 | 293 |
| | | | | | | 47% | 192 | 299 |
| | | | | | | 44% | 324 | 404 |
| | | | | | | 41% | 303 | 404 |
| HKGDI91 | 927222 | 115 | HMMER | PFAM: EGF-like domain | PF00008 | 36.48 | 255 | 359 |
| | | | 1.8 | | | | | |
| | | | blastx.2 | DLL3 protein precursor. | sp\|AAF62542\|AAF62542 | 100% | 180 | 404 |
| | | | | | | 39% | 111 | 431 |
| | | | | | | 42% | 192 | 404 |
| MKBA52 | 937325 | 116 | HMMER | PFAM: Bacterial mutT | PF00293 | 4.28 | 223 | 267 |
| | | | 1.8 | protein | | | | |
| HLCMP75 | 1203728 | 44 | blastx.14 | Tumor endothelial marker | sp\|AAG00867\|AAG00867 | 88% | 160 | 702 |
| | | | | 1 precursor. | | 100% | 1088 | 1267 |
| | | | | | | 71% | 823 | 1089 |
| | | | | | | 100% | 26 | 169 |
| | | | | | | 93% | 708 | 797 |
| | | | | | | 35% | 523 | 693 |
| | | | | | | 41% | 601 | 693 |
| | | | | | | 45% | 619 | 690 |
| | | | | | | 42% | 702 | 785 |
| | | | | | | 46% | 702 | 785 |
| | | | | | | 37% | 586 | 690 |
| | | | | | | 38% | 705 | 797 |
| | | | | | | 55% | 256 | 315 |
| | | | | | | 32% | 781 | 909 |
| | | | | | | 62% | 32 | 79 |
| | | | | | | 34% | 714 | 809 |
| | | | | | | 39% | 548 | 631 |
| | | | | | | 40% | 104 | 169 |
| | | | | | | 31% | 592 | 696 |
| | | | | | | 30% | 811 | 909 |
| | | | | | | 37% | 823 | 909 |
| | | | | | | 36% | 469 | 534 |
| | | | | | | 31% | 583 | 678 |
| | | | | | | 28% | 595 | 690 |
| | | | | | | 31% | 592 | 687 |
| | | | | | | 61% | 29 | 67 |
| | | | | | | 50% | 414 | 461 |
| | | | | | | 46% | 652 | 696 |
| | | | | | | 36% | 820 | 885 |
| | | | | | | 50% | 499 | 534 |
| | | | | | | 50% | 898 | 933 |
| | | | | | | 24% | 711 | 797 |
| | | | | | | 35% | 828 | 887 |
| | | | | | | 27% | 832 | 939 |
| | | | | | | 29% | 607 | 678 |
| | | | | | | 47% | 831 | 881 |
| | | | | | | 46% | 702 | 746 |
| | | | | | | 36% | 1317 | 1382 |
| | | | | | | 41% | 197 | 247 |
| HLCMP75 | 944722 | 117 | HMMER | PFAM: EGF-like domain | PF00008 | 33 | 200 | 304 |
| | | | 2.1.1 | | | | | |
| | | | blastx.2 | Tumor endothelial marker | sp\|AAG00867\|AAG00867 | 84% | 14 | 853 |
| | | | | 1 precursor. | | 63% | 14 | 922 |
| | | | | | | 88% | 852 | 959 |
| | | | | | | 27% | 464 | 922 |
| | | | | | | 26% | 488 | 898 |
| | | | | | | 42% | 182 | 304 |
| | | | | | | 33% | 147 | 236 |
| | | | | | | 29% | 452 | 583 |
| HWHQR25 | 1126358 | 45 | blastx.14 | (AF006488) deltaB | gi\|2772825\|gb\|AAC | 66% | 22 | 420 |
| | | | | [Danio rerio] | 41241.1\| | 58% | 426 | 704 |
| | | | | | | 44% | 420 | 698 |
| | | | | | | 42% | 148 | 408 |
| | | | | | | 58% | 537 | 701 |
| | | | | | | 42% | 423 | 653 |
| | | | | | | 38% | 190 | 423 |
| | | | | | | 43% | 423 | 593 |
| | | | | | | 45% | 181 | 351 |
| | | | | | | 42% | 49 | 132 |
| | | | | | | 50% | 651 | 704 |
| | | | | | | 37% | 432 | 518 |
| | | | | | | 42% | 660 | 722 |
| | | | | | | 23% | 79 | 204 |
| | | | | | | 66% | 498 | 533 |
| | | | | | | 50% | 142 | 183 |
| | | | | | | 28% | 79 | 162 |
| | | | | | | 27% | 546 | 611 |
| | | | | | | 32% | 52 | 126 |
| | | | | | | 50% | 612 | 653 |
| | | | | | | 25% | 426 | 497 |
| | | | | | | 50% | 199 | 234 |
| | | | | | | 42% | 307 | 348 |
| | | | | | | 40% | 367 | 411 |
| HWUQR25 | 947020 | 118 | HMMER | PFAM: EGF-like domain | PF00008 | 102.5 | 113 | 214 |
| | | | 2.1.1 | | | | | |
| | | | blastx.2 | Notch ligand DLL4. | sp\|AAF76427\|AAF76427 | 99% | 2 | 538 |
| | | | | | | 41% | 20 | 535 |
| | | | | | | 37% | 2 | 535 |
| | | | | | | 41% | 8 | 481 |
| | | | | | | 35% | 32 | 535 |
| HLKAB61 | 1183217 | 46 | blastx.14 | cell surface protein [Mus | gi\|2373395\|dbj\|BAA | 84% | 159 | 347 |
| | | | | musculus] | 22094.1\| | 87% | 324 | 395 |
| | | | | | | 41% | 198 | 341 |
| | | | | | | 52% | 333 | 389 |
| | | | | | | 50% | 237 | 290 |
| | | | | | | 53% | 249 | 287 |
| | | | | | | 43% | 237 | 284 |
| | | | | | | 85% | 333 | 353 |
| | | | | | | 75% | 330 | 353 |
| | | | | | | 85% | 333 | 353 |
| | | | | | | 85% | 333 | 353 |
| | | | | | | 85% | 333 | 353 |
| | | | | | | 85% | 333 | 353 |
| | | | | | | 55% | 375 | 401 |
| | | | | | | 71% | 333 | 353 |
| | | | | | | 50% | 333 | 362 |
| | | | | | | 71% | 333 | 353 |
| | | | | | | 71% | 333 | 353 |
| | | | | | | 71% | 333 | 353 |
| HLKAB61 | 948002 | 119 | HMMER | PFAM: EGF-like domain | PF00008 | 30.43 | 159 | 263 |
| | | | 1.8 | | | | | |
| | | | blastx.2 | cell-fate determining gene | pir\|A49128\|A49128 | 86% | 138 | 296 |
| | | | | Notch2 protein - rat | | | | |
| HEGAZ61 | 950033 | 120 | HMMER | PFAM: Reprolysin family | PF01562 | 141.4 | 276 | 560 |
| | | | 2.1.1 | propeptide | | | | |
| | | | blastx.2 | epididymal apical protein | emb\|CAA46929.1\| | 92% | 60 | 560 |
| | | | | I-precursor [Macaca | | | | |
| | | | | fascicularis] | | | | |
| HPJEQ52 | 953155 | 121 | HMMER | PFAM: Bacterial mutT | PF00293 | 37.64 | 152 | 277 |
| | | | 1.8 | protein | | | | |
| HFIZB56 | 1137798 | 49 | blastx.14 | developmental protein | gi\|157993\|gb\|AAA28725.1\| | 55% | 2 | 412 |
| | | | | [Drosophila melanogaster] | | 52% | 2 | 409 |
| | | | | | | 49% | 2 | 415 |
| | | | | | | 48% | 2 | 406 |
| | | | | | | 47% | 2 | 406 |
| | | | | | | 47% | 2 | 415 |
| | | | | | | 41% | 2 | 409 |
| | | | | | | 41% | 2 | 409 |
| | | | | | | 50% | 2 | 328 |
| | | | | | | 40% | 2 | 379 |
| | | | | | | 48% | 86 | 409 |
| | | | | | | 39% | 2 | 415 |
| | | | | | | 37% | 11 | 415 |
| | | | | | | 50% | 89 | 412 |
| | | | | | | 41% | 2 | 376 |
| | | | | | | 52% | 116 | 409 |
| | | | | | | 44% | 2 | 343 |
| | | | | | | 47% | 104 | 409 |
| | | | | | | 39% | 2 | 313 |
| | | | | | | 41% | 2 | 238 |
| | | | | | | 48% | 200 | 415 |
| | | | | | | 46% | 209 | 415 |
| | | | | | | 41% | 116 | 331 |
| | | | | | | 47% | 227 | 415 |
| | | | | | | 42% | 98 | 301 |
| | | | | | | 39% | 2 | 223 |
| | | | | | | 35% | 212 | 433 |
| | | | | | | 37% | 2 | 178 |
| | | | | | | 35% | 230 | 409 |
| | | | | | | 45% | 74 | 178 |
| | | | | | | 48% | 314 | 412 |
| | | | | | | 41% | 302 | 409 |
| | | | | | | 37% | 188 | 298 |
| | | | | | | 35% | 332 | 415 |
| | | | | | | 42% | 332 | 415 |
| | | | | | | 45% | 2 | 73 |
| | | | | | | 47% | 251 | 313 |
| | | | | | | 39% | 131 | 199 |
| | | | | | | 38% | 23 | 85 |
| | | | | | | 38% | 23 | 85 |
| | | | | | | 42% | 101 | 178 |
| | | | | | | 50% | 197 | 268 |
| | | | | | | 45% | 248 | 313 |
| | | | | | | 42% | 137 | 199 |
| | | | | | | 47% | 23 | 73 |
| | | | | | | 40% | 236 | 301 |
| | | | | | | 40% | 77 | 151 |
| | | | | | | 40% | 350 | 415 |
| | | | | | | 35% | 365 | 415 |
| | | | | | | 38% | 362 | 415 |
| | | | | | | 53% | 83 | 121 |
| | | | | | | 53% | 134 | 178 |
| | | | | | | 40% | 167 | 232 |
| | | | | | | 53% | 197 | 235 |
| | | | | | | 58% | 311 | 346 |
| | | | | | | 42% | 137 | 178 |
| | | | | | | 46% | 1214 | 1258 |
| | | | | | | 50% | 191 | 232 |
| | | | | | | 40% | 77 | 121 |
| | | | | | | 46% | 29 | 67 |
| | | | | | | 39% | 8 | 76 |
| | | | | | | 40% | 77 | 121 |
| | | | | | | 38% | 83 | 136 |
| | | | | | | 50% | 266 | 307 |
| | | | | | | 33% | 108 | 170 |
| HFIZB56 | 955618 | 122 | HMMER | PFAM: EGF-like domain | PF00008 | 112.1 | 312 | 407 |
| | | | 2.1.1 | | | | | |
| | | | blastx.2 | FIBROPELLIN III | sq\|Q25059\|Q25059 | 56% | 3 | 410 |
| | | | | (FRAGMENT). | | 48% | 3 | 416 |
| | | | | | | 49% | 3 | 410 |
| | | | | | | 45% | 3 | 470 |
| | | | | | | 48% | 42 | 416 |
| HUKEP18 | 1106982 | 50 | blastx.14 | (AF100707) testes- | gi\|6652836\|gb\|AAF | 100% | 139 | 513 |
| | | | | specific protein TSP50 | 22500.1\|AF100707_1 | | | |
| | | | | [Homo sapiens] | | | | |
| HUKEP18 | 957456 | 123 | HMMER | PFAM: Trypsin | PF00089 | 82.96 | 729 | 361 |
| | | | 1.8 | | | | | |
| | | | blastx.2 | TESTES-SPECIFIC | sp\|Q9UI38\|Q9UI38 | 100% | 735 | 340 |
| | | | | PROTEIN TSP50. | | | | |
| HEEAN63 | 960233 | 124 | HMMER | PFAM: Bacterial mutT | PF00293 | 4.79 | 255 | 290 |
| | | | 1.8 | protein | | | | |
| | | | blastx.2 | CG11095 PROTEIN. | sp\|Q9VY79\|Q9VY79 | 37% | 249 | 614 |
| | | | | | | 48% | 149 | 229 |
| HTKAA03 | 961002 | 52 | HMMER | PFAM; | PF01557 | 89.9 | 2 | 148 |
| | | | 2.1.1 | Fumarylacetoacetate | | | | |
| | | | | (FAA) hydrolase family | | | | |
| | | | blastx.2 | probable 2-hydroxyhepta- | pir\|A64864\|A64864 | 98% | 2 | 202 |
| | | | | 2,4-diene-1,7-dioate | | | | |
| | | | | isomerase b1180 - | | | | |
| | | | | Escherichia coli | | | | |
| HTTKB18 | 963346 | 53 | HMMER | PFAM: Bacterial mutT | PF00293 | 4.1 | 722 | 853 |
| | | | 1.8 | protein | | | | |
| | | | blastx.14 | MEM3 [Mus musculus] | gi\|1354050\|gb\|AAB | 83% | 1352 | 2083 |
| | | | | | 18153.1\| | 93% | 767 | 1363 |
| | | | | | | 99% | 2084 | 2440 |
| | | | | | | 76% | 284 | 736 |
| | | | | | | 80% | 195 | 287 |
| | | | | | | 100% | 745 | 768 |
| | | | | | | 35% | 812 | 871 |
| | | | | | | 42% | 1028 | 1090 |
| | | | | | | 41% | 189 | 239 |
| HPTZB93 | 1222478 | 54 | blastx.14 | CRIPTO, FRL-1, | sp\|P97766\|P97766 | 52% | 330 | 755 |
| | | | | CRYPTIC FAMILY 1. | | 60% | 279 | 353 |
| HPTZB93 | 971842 | 125 | HMMER | PFAM: EGF-like domain | PF00008 | 20.4 | 562 | 491 |
| | | | 1.8 | | | | | |
| | | | blastx.2 | CRIPTO, FRL-1, | sp\|P97766\|P97766 | 55% | 820 | 344 |
| | | | | CRYPTIC FAMILY 1. | | | | |
| HTSHM38 | 1138085 | 55 | blastx.2 | MEGF6 protein - rat | pir\|T13954\|T13954 | 69% | 1 | 447 |
| | | | | | | 43% | 70 | 423 |
| | | | | | | 35% | 1 | 429 |
| | | | | | | 35% | 4 | 435 |
| | | | | | | 33% | 1 | 333 |
| | | | | | | 72% | 1159 | 1278 |
| | | | | | | 44% | 1168 | 1275 |
| | | | | | | 38% | 1168 | 1275 |
| | | | | | | 40% | 1168 | 1278 |
| | | | | | | 38% | 1168 | 1275 |
| | | | | | | 42% | 1165 | 1278 |
| | | | | | | 37% | 1201 | 1302 |
| | | | | | | 40% | 962 | 1066 |
| | | | | | | 30% | 995 | 1210 |
| | | | | | | 70% | 748 | 777 |
| | | | | | | 33% | 1219 | 1299 |
| HTSHM38 | 972248 | 126 | HMMER | PFAM: EGF-like domain | PF00008 | 72 | 299 | 406 |
| | | | 2.1.1 | | | | | |
| | | | blastx.2 | MEGF6 protein - rat | pir\|T13954\|T13954 | 70% | 185 | 556 |
| | | | | | | 46% | 218 | 556 |
| | | | | | | 43% | 179 | 532 |
| | | | | | | 43% | 182 | 535 |
| | | | | | | 37% | 173 | 538 |
| | | | | | | 37% | 185 | 550 |
| | | | | | | 35% | 185 | 442 |
| | | | | | | 34% | 170 | 544 |
| | | | | | | 35% | 149 | 544 |
| | | | | | | 35% | 188 | 571 |
| | | | | | | 35% | 203 | 550 |
| | | | | | | 36% | 188 | 544 |
| | | | | | | 65% | 105 | 173 |
| | | | | | | 47% | 430 | 483 |
| HELDY60 | 1056195 | 56 | blastx.14 | fibulin-1D [Homo | gi\|1621019\|gb\|AAB | 41% | 1404 | 1598 |
| | | | | sapiens] | 17099.1\| | 48% | 2106 | 2255 |
| | | | | | | 40% | 1875 | 2039 |
| | | | | | | 33% | 2028 | 2222 |
| | | | | | | 48% | 1419 | 1535 |
| | | | | | | 51% | 2052 | 2156 |
| | | | | | | 48% | 1851 | 1973 |
| | | | | | | 47% | 1482 | 1601 |
| | | | | | | 34% | 1812 | 1976 |
| | | | | | | 50% | 1944 | 2057 |
| | | | | | | 37% | 1470 | 1622 |
| | | | | | | 40% | 2097 | 2222 |
| | | | | | | 48% | 1500 | 1598 |
| | | | | | | 35% | 1806 | 1982 |
| | | | | | | 50% | 1884 | 1973 |
| | | | | | | 41% | 1851 | 1973 |
| | | | | | | 51% | 2040 | 2120 |
| | | | | | | 60% | 1674 | 1748 |
| | | | | | | 39% | 2058 | 2156 |
| | | | | | | 60% | 1608 | 1676 |
| | | | | | | 48% | 1500 | 1598 |
| | | | | | | 36% | 1434 | 1532 |
| | | | | | | 52% | 1599 | 1667 |
| | | | | | | 43% | 2133 | 2222 |
| | | | | | | 44% | 2136 | 2222 |
| | | | | | | 42% | 2124 | 2222 |
| | | | | | | 48% | 1512 | 1598 |
| | | | | | | 37% | 1416 | 1496 |
| | | | | | | 50% | 1935 | 2006 |
| | | | | | | 46% | 1692 | 1775 |
| | | | | | | 50% | 1419 | 1478 |
| | | | | | | 40% | 1683 | 1748 |
| | | | | | | 36% | 1659 | 1748 |
| | | | | | | 50% | 1977 | 2036 |
| | | | | | | 39% | 1599 | 1667 |
| | | | | | | 55% | 1614 | 1667 |
| | | | | | | 50% | 2274 | 2321 |
| | | | | | | 52% | 2052 | 2102 |
| | | | | | | 36% | 1938 | 2036 |
| | | | | | | 64% | 1986 | 2036 |
| | | | | | | 56% | 1683 | 1730 |
| | | | | | | 29% | 1755 | 1907 |
| | | | | | | 47% | 1353 | 1415 |
| | | | | | | 32% | 1329 | 1412 |
| | | | | | | 39% | 1758 | 1841 |
| | | | | | | 53% | 1752 | 1796 |
| | | | | | | 50% | 1560 | 1613 |
| | | | | | | 52% | 1563 | 1613 |
| | | | | | | 63% | 1635 | 1667 |
| | | | | | | 40% | 2034 | 2108 |
| | | | | | | 41% | 1353 | 1424 |
| | | | | | | 38% | 1608 | 1670 |
| | | | | | | 66% | 2058 | 2093 |
| | | | | | | 46% | 1425 | 1469 |
| | | | | | | 40% | 1353 | 1418 |
| | | | | | | 38% | 1719 | 1781 |
| | | | | | | 43% | 1794 | 1841 |
| | | | | | | 40% | 1794 | 1859 |
| | | | | | | 50% | 1689 | 1724 |
| | | | | | | 77% | 2016 | 2042 |
| | | | | | | 60% | 2064 | 2093 |
| | | | | | | 60% | 1752 | 1781 |
| | | | | | | 70% | 2193 | 2222 |
| | | | | | | 66% | 1644 | 1670 |
| | | | | | | 33% | 1350 | 1430 |
| | | | | | | 46% | 1686 | 1724 |
| | | | | | | 70% | 1752 | 1781 |
| | | | | | | 29% | 1794 | 1844 |
| | | | | | | 71% | 1761 | 1781 |
| | | | | | | 60% | 1695 | 1724 |
| | | | | | | 70% | 2007 | 2036 |
| | | | | | | 38% | 1530 | 1583 |
| | | | | | | 20% | 1398 | 1469 |
| | | | | | | 25% | 1740 | 1859 |
| | | | | | | 57% | 1374 | 1415 |
| | | | | | | 75% | 1644 | 1667 |
| | | | | | | 31% | 1794 | 1841 |
| | | | | | | 60% | 1392 | 1421 |
| | | | | | | 33% | 1548 | 1610 |
| | | | | | | 50% | 2016 | 2051 |
| | | | | | | 24% | 1515 | 1625 |
| HELDY60 | 975104 | 128 | HMMER | PFAM: Thrombospondin | PF00090 | 169.6 | 286 | 438 |
| | | | 2.1.1 | type 1 domain | | | | |
| | | | blastx.14 | putative [Bos taurus] | gi\|508428\|gb\|AAA | 47% | 2017 | 2250 |
| | | | | | 74122.1\| | 43% | 2041 | 2247 |
| | | | | | | 52% | 2032 | 2208 |
| | | | | | | 42% | 1948 | 2157 |
| | | | | | | 40% | 1432 | 1629 |
| | | | | | | 52% | 1513 | 1650 |
| | | | | | | 37% | 2032 | 2268 |
| | | | | | | 37% | 2041 | 2280 |
| | | | | | | 40% | 2032 | 2238 |
| | | | | | | 53% | 1984 | 2100 |
| | | | | | | 37% | 2041 | 2250 |
| | | | | | | 42% | 2041 | 2208 |
| | | | | | | 37% | 1528 | 1695 |
| | | | | | | 41% | 2041 | 2205 |
| | | | | | | 40% | 1783 | 1938 |
| | | | | | | 45% | 1525 | 1650 |
| | | | | | | 52% | 1597 | 1710 |
| | | | | | | 41% | 1984 | 2136 |
| | | | | | | 43% | 1525 | 1662 |
| | | | | | | 36% | 2032 | 2238 |
| | | | | | | 46% | 1537 | 1659 |
| | | | | | | 40% | 1705 | 1839 |
| | | | | | | 54% | 2032 | 2130 |
| | | | | | | 42% | 1705 | 1845 |
| | | | | | | 42% | 1984 | 2103 |
| | | | | | | 38% | 1450 | 1635 |
| | | | | | | 50% | 2113 | 2238 |
| | | | | | | 34% | 1489 | 1662 |
| | | | | | | 33% | 2041 | 2262 |
| | | | | | | 42% | 1534 | 1659 |
| | | | | | | 38% | 1537 | 1662 |
| | | | | | | 42% | 1537 | 1662 |
| | | | | | | 42% | 1537 | 1662 |
| | | | | | | 48% | 1537 | 1629 |
| | | | | | | 36% | 1783 | 1965 |
| | | | | | | 46% | 2038 | 2160 |
| | | | | | | 39% | 1537 | 1635 |
| | | | | | | 43% | 1780 | 1890 |
| | | | | | | 51% | 1792 | 1878 |
| | | | | | | 32% | 1495 | 1662 |
| | | | | | | 32% | 1537 | 1665 |
| | | | | | | 42% | 2041 | 2154 |
| | | | | | | 41% | 1783 | 1890 |
| | | | | | | 48% | 1537 | 1629 |
| | | | | | | 30% | 1666 | 1845 |
| | | | | | | 36% | 2041 | 2172 |
| | | | | | | 42% | 1495 | 1620 |
| | | | | | | 57% | 2164 | 2247 |
| | | | | | | 39% | 1537 | 1659 |
| | | | | | | 43% | 2041 | 2163 |
| | | | | | | 42% | 1744 | 1842 |
| | | | | | | 45% | 2032 | 2124 |
| | | | | | | 41% | 1537 | 1629 |
| | | | | | | 39% | 2041 | 2154 |
| | | | | | | 42% | 2041 | 2154 |
| | | | | | | 41% | 1534 | 1620 |
| | | | | | | 42% | 2032 | 2145 |
| | | | | | | 38% | 1696 | 1827 |
| | | | | | | 36% | 2041 | 2154 |
| | | | | | | 38% | 1537 | 1662 |
| | | | | | | 51% | 2023 | 2109 |
| | | | | | | 44% | 2041 | 2154 |
| | | | | | | 39% | 1537 | 1650 |
| | | | | | | 29% | 1450 | 1611 |
| | | | | | | 37% | 1534 | 1629 |
| | | | | | | 38% | 1588 | 1695 |
| | | | | | | 28% | 1663 | 1839 |
| | | | | | | 39% | 2041 | 2154 |
| | | | | | | 35% | 1537 | 1653 |
| | | | | | | 41% | 1537 | 1638 |
| | | | | | | 43% | 1843 | 1938 |
| | | | | | | 44% | 2161 | 2247 |
| | | | | | | 41% | 1537 | 1629 |
| | | | | | | 46% | 2161 | 2250 |
| | | | | | | 39% | 1537 | 1620 |
| | | | | | | 63% | 2041 | 2097 |
| | | | | | | 48% | 1537 | 1617 |
| | | | | | | 57% | 2164 | 2226 |
| | | | | | | 70% | 2041 | 2100 |
| | | | | | | 37% | 1414 | 1533 |
| | | | | | | 39% | 2041 | 2139 |
| | | | | | | 57% | 1783 | 1839 |
| | | | | | | 28% | 1534 | 1680 |
| | | | | | | 27% | 1450 | 1593 |
| | | | | | | 48% | 2164 | 2238 |
| | | | | | | 34% | 2011 | 2157 |
| | | | | | | 58% | 1426 | 1497 |
| | | | | | | 50% | 1705 | 1782 |
| | | | | | | 39% | 2032 | 2145 |
| | | | | | | 52% | 2164 | 2238 |
| | | | | | | 34% | 2041 | 2172 |
| | | | | | | 46% | 2161 | 2238 |
| | | | | | | 48% | 1858 | 1938 |
| | | | | | | 43% | 1849 | 1938 |
| | | | | | | 50% | 2161 | 2238 |
| | | | | | | 40% | 2161 | 2250 |
| | | | | | | 48% | 2164 | 2250 |
| | | | | | | 42% | 1705 | 1782 |
| | | | | | | 44% | 1858 | 1938 |
| | | | | | | 42% | 2161 | 2238 |
| | | | | | | 42% | 2032 | 2130 |
| | | | | | | 39% | 2164 | 2247 |
| | | | | | | 52% | 1783 | 1845 |
| | | | | | | 45% | 1780 | 1845 |
| | | | | | | 42% | 2161 | 2238 |
| | | | | | | 43% | 1849 | 1938 |
| | | | | | | 40% | 1780 | 1875 |
| | | | | | | 40% | 2161 | 2250 |
| | | | | | | 42% | 1765 | 1848 |
| | | | | | | 50% | 2032 | 2121 |
| | | | | | | 42% | 1705 | 1782 |
| | | | | | | 52% | 1792 | 1842 |
| | | | | | | 61% | 1792 | 1845 |
| | | | | | | 54% | 2161 | 2226 |
| | | | | | | 41% | 1432 | 1518 |
| | | | | | | 45% | 1774 | 1839 |
| | | | | | | 41% | 2161 | 2232 |
| | | | | | | 52% | 1789 | 1845 |
| | | | | | | 41% | 1426 | 1512 |
| | | | | | | 40% | 1657 | 1737 |
| | | | | | | 55% | 1792 | 1845 |
| | | | | | | 41% | 1855 | 1941 |
| | | | | | | 47% | 2152 | 2208 |
| | | | | | | 47% | 1702 | 1764 |
| | | | | | | 52% | 1789 | 1845 |
| | | | | | | 33% | 1783 | 1863 |
| | | | | | | 50% | 1702 | 1773 |
| | | | | | | 55% | 1705 | 1764 |
| | | | | | | 50% | 2491 | 2544 |
| | | | | | | 37% | 1702 | 1782 |
| | | | | | | 46% | 1852 | 1941 |
| | | | | | | 44% | 1648 | 1728 |
| | | | | | | 57% | 1447 | 1509 |
| | | | | | | 50% | 1597 | 1662 |
| | | | | | | 62% | 2161 | 2208 |
| | | | | | | 33% | 2161 | 2250 |
| | | | | | | 42% | 1525 | 1587 |
| | | | | | | 40% | 1447 | 1527 |
| | | | | | | 58% | 2494 | 2544 |
| | | | | | | 44% | 2014 | 2088 |
| | | | | | | 50% | 1450 | 1509 |
| | | | | | | 42% | 1450 | 1527 |
| | | | | | | 52% | 1792 | 1842 |
| | | | | | | 58% | 1792 | 1842 |
| | | | | | | 66% | 2509 | 2544 |
| | | | | | | 40% | 2041 | 2121 |
| | | | | | | 34% | 1705 | 1782 |
| | | | | | | 50% | 1705 | 1764 |
| | | | | | | 36% | 1840 | 1938 |
| | | | | | | 35% | 1609 | 1710 |
| | | | | | | 30% | 1849 | 1998 |
| | | | | | | 47% | 1984 | 2040 |
| | | | | | | 39% | 1705 | 1788 |
| | | | | | | 55% | 1792 | 1845 |
| | | | | | | 52% | 1537 | 1587 |
| | | | | | | 43% | 1705 | 1773 |
| | | | | | | 56% | 1792 | 1839 |
| | | | | | | 40% | 1534 | 1599 |
| | | | | | | 45% | 1705 | 1764 |
| | | | | | | 53% | 2164 | 2208 |
| | | | | | | 50% | 2041 | 2094 |
| | | | | | | 37% | 1537 | 1617 |
| | | | | | | 47% | 1792 | 1842 |
| | | | | | | 56% | 2161 | 2208 |
| | | | | | | 75% | 2509 | 2544 |
| | | | | | | 36% | 1447 | 1536 |
| | | | | | | 44% | 1789 | 1842 |
| | | | | | | 42% | 2161 | 2238 |
| | | | | | | 35% | 1849 | 1941 |
| | | | | | | 50% | 2032 | 2091 |
| | | | | | | 40% | 1447 | 1512 |
| | | | | | | 41% | 1702 | 1773 |
| | | | | | | 42% | 1450 | 1527 |
| | | | | | | 43% | 1792 | 1839 |
| | | | | | | 50% | 1792 | 1839 |
| | | | | | | 45% | 1705 | 1764 |
| | | | | | | 33% | 1858 | 1938 |
| | | | | | | 37% | 1447 | 1527 |
| | | | | | | 56% | 1789 | 1836 |
| | | | | | | 47% | 2032 | 2088 |
| | | | | | | 47% | 1789 | 1845 |
| | | | | | | 34% | 2494 | 2580 |
| | | | | | | 40% | 1657 | 1731 |
| | | | | | | 47% | 1792 | 1842 |
| | | | | | | 50% | 1705 | 1764 |
| | | | | | | 57% | 1654 | 1710 |
| | | | | | | 60% | 2164 | 2208 |
| | | | | | | 45% | 1450 | 1509 |
| | | | | | | 52% | 2494 | 2544 |
| | | | | | | 34% | 1705 | 1773 |
| | | | | | | 47% | 2494 | 2544 |
| | | | | | | 34% | 1861 | 1938 |
| | | | | | | 44% | 1792 | 1845 |
| | | | | | | 37% | 1702 | 1782 |
| | | | | | | 39% | 1687 | 1770 |
| | | | | | | 50% | 1792 | 1857 |
| | | | | | | 32% | 2494 | 2586 |
| | | | | | | 42% | 1420 | 1497 |
| | | | | | | 43% | 1792 | 1839 |
| | | | | | | 45% | 1948 | 2007 |
| | | | | | | 47% | 1888 | 1938 |
| | | | | | | 66% | 2509 | 2544 |
| | | | | | | 53% | 1981 | 2025 |
| | | | | | | 60% | 1897 | 1941 |
| | | | | | | 50% | 1792 | 1845 |
| | | | | | | 40% | 2494 | 2568 |
| | | | | | | 34% | 1450 | 1527 |
| | | | | | | 47% | 2161 | 2217 |
| | | | | | | 50% | 2503 | 2544 |
| | | | | | | 50% | 1858 | 1893 |
| | | | | | | 41% | 1789 | 1839 |
| | | | | | | 58% | 2509 | 2544 |
| | | | | | | 41% | 1981 | 2031 |
| | | | | | | 44% | 1984 | 2037 |
| | | | | | | 34% | 2494 | 2571 |
| | | | | | | 38% | 1945 | 2007 |
| | | | | | | 42% | 1981 | 2037 |
| | | | | | | 33% | 1447 | 1527 |
| | | | | | | 33% | 1528 | 1617 |
| | | | | | | 61% | 2462 | 2500 |
| | | | | | | 36% | 2032 | 2088 |
| | | | | | | 33% | 1702 | 1773 |
| | | | | | | 31% | 2104 | 2208 |
| | | | | | | 66% | 2164 | 2199 |
| | | | | | | 50% | 1792 | 1845 |
| | | | | | | 47% | 2544 | 2594 |
| | | | | | | 33% | 1696 | 1767 |
| | | | | | | 34% | 1537 | 1605 |
| | | | | | | 25% | 1948 | 2064 |
| | | | | | | 45% | 1600 | 1659 |
| | | | | | | 53% | 2550 | 2594 |
| | | | | | | 42% | 2494 | 2550 |
| | | | | | | 36% | 2494 | 2568 |
| | | | | | | 50% | 2547 | 2594 |
| | | | | | | 53% | 1855 | 1893 |
| | | | | | | 39% | 2509 | 2577 |
| | | | | | | 36% | 2494 | 2568 |
| | | | | | | 44% | 2494 | 2547 |
| | | | | | | 47% | 2494 | 2544 |
| | | | | | | 70% | 1849 | 1878 |
| | | | | | | 33% | 1402 | 1509 |
| | | | | | | 50% | 1792 | 1845 |
| | | | | | | 60% | 2164 | 2208 |
| | | | | | | 34% | 1702 | 1770 |
| | | | | | | 38% | 2494 | 2547 |
| | | | | | | 33% | 1570 | 1659 |
| | | | | | | 40% | 2494 | 2568 |
| | | | | | | 53% | 1537 | 1581 |
| | | | | | | 52% | 2544 | 2594 |
| | | | | | | 53% | 2462 | 2500 |
| | | | | | | 40% | 2509 | 2568 |
| | | | | | | 72% | 1489 | 1521 |
| | | | | | | 43% | 2113 | 2160 |
| | | | | | | 53% | 1849 | 1887 |
| | | | | | | 38% | 2494 | 2547 |
| | | | | | | 44% | 2494 | 2547 |
| | | | | | | 46% | 2032 | 2076 |
| | | | | | | 47% | 2494 | 2544 |
| | | | | | | 42% | 139 | 195 |
| | | | | | | 39% | 1969 | 2037 |
| | | | | | | 45% | 1789 | 1848 |
| | | | | | | 50% | 2161 | 2208 |
| | | | | | | 42% | 1705 | 1767 |
| | | | | | | 32% | 1948 | 2031 |
| | | | | | | 46% | 2550 | 2594 |
| | | | | | | 46% | 1537 | 1581 |
| | | | | | | 42% | 1603 | 1659 |
| | | | | | | 58% | 2465 | 2500 |
| | | | | | | 47% | 2494 | 2544 |
| | | | | | | 40% | 1732 | 1776 |
| | | | | | | 70% | 1666 | 1695 |
| | | | | | | 53% | 1984 | 2028 |
| | | | | | | 50% | 1738 | 1773 |
| | | | | | | 64% | 1966 | 2007 |
| | | | | | | 38% | 1792 | 1845 |
| | | | | | | 53% | 1606 | 1650 |
| | | | | | | 47% | 2544 | 2594 |
| | | | | | | 37% | 1534 | 1581 |
| | | | | | | 38% | 2494 | 2547 |
| | | | | | | 75% | 2462 | 2485 |
| | | | | | | 50% | 2503 | 2544 |
| | | | | | | 54% | 1909 | 1941 |
| | | | | | | 47% | 1705 | 1755 |
| | | | | | | 44% | 1972 | 2025 |
| | | | | | | 54% | 1666 | 1698 |
| | | | | | | 46% | 1963 | 2007 |
| | | | | | | 63% | 1666 | 1698 |
| | | | | | | 69% | 1657 | 1695 |
| | | | | | | 80% | 1666 | 1695 |
| | | | | | | 47% | 2494 | 2544 |
| | | | | | | 53% | 1666 | 1710 |
| | | | | | | 80% | 1666 | 1695 |
| | | | | | | 40% | 1666 | 1710 |
| | | | | | | 37% | 1705 | 1776 |
| | | | | | | 46% | 1840 | 1878 |
| | | | | | | 53% | 1978 | 2016 |
| | | | | | | 53% | 1657 | 1695 |
| | | | | | | 47% | 1609 | 1659 |
| | | | | | | 77% | 2462 | 2488 |
| | | | | | | 43% | 1663 | 1710 |
| | | | | | | 56% | 2547 | 2594 |
| | | | | | | 53% | 1600 | 1638 |
| | | | | | | 70% | 1666 | 1695 |
| | | | | | | 33% | 1702 | 1764 |
| | | | | | | 42% | 1975 | 2031 |
| | | | | | | 45% | 2485 | 2544 |
| | | | | | | 34% | 2485 | 2562 |
| | | | | | | 70% | 1909 | 1938 |
| | | | | | | 70% | 1984 | 2013 |
| | | | | | | 31% | 1984 | 2031 |
| | | | | | | 44% | 2494 | 2547 |
| | | | | | | 30% | 1849 | 1938 |
| | | | | | | 28% | 1489 | 1602 |
| | | | | | | 31% | 1960 | 2025 |
| | | | | | | 50% | 2119 | 2160 |
| | | | | | | 58% | 2509 | 2544 |
| | | | | | | 38% | 1447 | 1509 |
| | | | | | | 46% | 2509 | 2547 |
| | | | | | | 70% | 2462 | 2491 |
| | | | | | | 32% | 1426 | 1509 |
| | | | | | | 53% | 1657 | 1695 |
| | | | | | | 36% | 1537 | 1602 |
| | | | | | | 50% | 1942 | 1983 |
| | | | | | | 38% | 1666 | 1728 |
| | | | | | | 50% | 1852 | 1887 |
| | | | | | | 58% | 1852 | 1887 |
| | | | | | | 41% | 1852 | 1887 |
| | | | | | | 41% | 1858 | 1908 |
| | | | | | | 54% | 1735 | 1767 |
| | | | | | | 38% | 1885 | 1938 |
| | | | | | | 100% | 2462 | 2482 |
| | | | | | | 66% | 2462 | 2488 |
| | | | | | | 70% | 1666 | 1695 |
| | | | | | | 53% | 1666 | 1710 |
| | | | | | | 40% | 1450 | 1509 |
| | | | | | | 50% | 2509 | 2544 |
| | | | | | | 53% | 2462 | 2500 |
| | | | | | | 46% | 2550 | 2594 |
| | | | | | | 77% | 1744 | 1770 |
| | | | | | | 31% | 1954 | 2010 |
| | | | | | | 50% | 1657 | 1698 |
| | | | | | | 30% | 1864 | 1941 |
| | | | | | | 53% | 2462 | 2500 |
| | | | | | | 37% | 1450 | 1521 |
| | | | | | | 60% | 1909 | 1938 |
| | | | | | | 60% | 1909 | 1938 |
| | | | | | | 85% | 1984 | 2004 |
| | | | | | | 60% | 1852 | 1881 |
| | | | | | | 70% | 1666 | 1695 |
| | | | | | | 31% | 1837 | 1893 |
| | | | | | | 63% | 1909 | 1941 |
| | | | | | | 60% | 1909 | 1938 |
| | | | | | | 38% | 1702 | 1755 |
| | | | | | | 75% | 2462 | 2485 |
| | | | | | | 53% | 2462 | 2500 |
| | | | | | | 87% | 2462 | 2485 |
| | | | | | | 75% | 2462 | 2485 |
| | | | | | | 30% | 2494 | 2562 |
| | | | | | | 50% | 2509 | 2544 |
| | | | | | | 60% | 1978 | 2007 |
| | | | | | | 43% | 2547 | 2594 |
| | | | | | | 29% | 2074 | 2154 |
| | | | | | | 54% | 1909 | 1941 |
| | | | | | | 50% | 2509 | 2544 |
| | | | | | | 42% | 1972 | 2013 |
| | | | | | | 60% | 1666 | 1695 |
| | | | | | | 60% | 1909 | 1938 |
| | | | | | | 46% | 2462 | 2500 |
| | | | | | | 71% | 2462 | 2482 |
| | | | | | | 53% | 1849 | 1887 |
| | | | | | | 40% | 310 | 375 |
| | | | | | | 44% | 1939 | 1992 |
| | | | | | | 40% | 1537 | 1581 |
| | | | | | | 63% | 1663 | 1695 |
| | | | | | | 40% | 1666 | 1710 |
| | | | | | | 46% | 1666 | 1710 |
| | | | | | | 32% | 1426 | 1509 |
| | | | | | | 50% | 2547 | 2588 |
| | | | | | | 66% | 1741 | 1767 |
| | | | | | | 58% | 1969 | 2004 |
| | | | | | | 75% | 2462 | 2485 |
| | | | | | | 37% | 2544 | 2591 |
| | | | | | | 43% | 1615 | 1662 |
| | | | | | | 30% | 1705 | 1782 |
| | | | | | | 40% | 2068 | 2112 |
| | | | | | | 40% | 1450 | 1515 |
| | | | | | | 66% | 1744 | 1770 |
| | | | | | | 54% | 1978 | 2010 |
| | | | | | | 46% | 1666 | 1710 |
| | | | | | | 40% | 1666 | 1710 |
| | | | | | | 33% | 1666 | 1737 |
| | | | | | | 53% | 1615 | 1659 |
| | | | | | | 50% | 1909 | 1938 |
| | | | | | | 71% | 1858 | 1878 |
| | | | | | | 35% | 1789 | 1839 |
| | | | | | | 38% | 1819 | 1881 |
| | | | | | | 50% | 2113 | 2154 |
| | | | | | | 62% | 2462 | 2485 |
| | | | | | | 75% | 2462 | 2485 |
| | | | | | | 46% | 2550 | 2594 |
| | | | | | | 85% | 2462 | 2482 |
| | | | | | | 50% | 2509 | 2544 |
| | | | | | | 47% | 2104 | 2154 |
| | | | | | | 46% | 2462 | 2500 |
| | | | | | | 50% | 1945 | 1992 |
| | | | | | | 50% | 1909 | 1938 |
| | | | | | | 29% | 1426 | 1518 |
| | | | | | | 38% | 2462 | 2500 |
| | | | | | | 85% | 2462 | 2482 |
| | | | | | | 35% | 2544 | 2594 |
| | | | | | | 42% | 2509 | 2550 |
| | | | | | | 35% | 2494 | 2544 |
| | | | | | | 50% | 1984 | 2025 |
| | | | | | | 85% | 2462 | 2482 |
| | | | | | | 46% | 2550 | 2594 |
| | | | | | | 32% | 294 | 368 |
| | | | | | | 61% | 1990 | 2028 |
| | | | | | | 41% | 1447 | 1497 |
| | | | | | | 50% | 1909 | 1938 |
| | | | | | | 60% | 1489 | 1518 |
| | | | | | | 46% | 2113 | 2157 |
| | | | | | | 41% | 1909 | 1959 |
| | | | | | | 85% | 2462 | 2482 |
| | | | | | | 55% | 1981 | 2007 |
| | | | | | | 71% | 1984 | 2004 |
| | | | | | | 33% | 1609 | 1689 |
| | | | | | | 70% | 1666 | 1695 |
| | | | | | | 71% | 2462 | 2482 |
| | | | | | | 37% | 2182 | 2229 |
| | | | | | | 40% | 1666 | 1710 |
| | | | | | | 29% | 1426 | 1506 |
| | | | | | | 55% | 1852 | 1878 |
| | | | | | | 46% | 2462 | 2500 |
| | | | | | | 42% | 1939 | 1995 |
| | | | | | | 42% | 1741 | 1782 |
| | | | | | | 71% | 2462 | 2482 |
| | | | | | | 50% | 1909 | 1938 |
| | | | | | | 46% | 1444 | 1488 |
| | | | | | | 25% | 139 | 258 |
| | | | | | | 46% | 1495 | 1533 |
| | | | | | | 35% | 2494 | 2544 |
| | | | | | | 36% | 1693 | 1749 |
| | | | | | | 62% | 1816 | 1839 |
| | | | | | | 85% | 1984 | 2004 |
| | | | | | | 85% | 2462 | 2482 |
| | | | | | | 50% | 2547 | 2594 |
| HNALE30 | 526878 | 129 | HMMER | PFAM: Bacterial mutT | PF00293 | 4.52 | 80 | 127 |
| | | | 1.8 | protein | | | | |
| HWADY16 | 1182316 | 58 | blastx.14 | (AC007785) BC282485_1 | gi\|504245\|gb\|AAD | 77% | 342 | 881 |
| | | | | [Homo sapiens] | 38244.1\|AC007785_2 | 91% | 35 | 346 |
| HWADY16 | 661322 | 130 | HMMER | PFAM: Bacterial mutT | PF00293 | 5.3 | 162 | 206 |
| | | | 1.8 | protein | | | | |
| HNTRU73 | 1173875 | 59 | blastx.14 | KIF3B protein [Mus | gi\|1060923\|dbj\|BAA | 100% | 3 | 182 |
| | | | | musculus] | 05070.1\| | 72% | 219 | 458 |
| HNTRU73 | 910009 | 131 | HMMER | PFAM: Kinesin motor | PF00225 | 114.5 | 3 | 188 |
| | | | 2.1.1 | domain | | | | |
| | | | blastx.14 | KIF3B protein [Mus | gi\|1060923\|dbj\|BAA | 73% | 219 | 1127 |
| | | | | musculus] | 05070.1\|1 | 100% | 3 | 182 |
| HLHCR16 | 910123 | 60 | HMMER | PFAM: Sushi domain | PF00084 | 744.9 | 197 | 358 |
| | | | 2.1.1 | (SCR repeat) | | | | |
| | | | blastx.2 | complement receptor 1 - | pir\|I36936\|I36936 | 29% | 710 | 1600 |
| | | | | chimpanzee (fragment) | | 30% | 1166 | 1921 |
| | | | | | | 31% | 818 | 1636 |
| | | | | | | 30% | 1958 | 2764 |
| | | | | | | 28% | 710 | 1513 |
| | | | | | | 29% | 1163 | 1921 |
| | | | | | | 29% | 1757 | 2632 |
| | | | | | | 28% | 1766 | 2632 |
| | | | | | | 31% | 911 | 1636 |
| | | | | | | 26% | 1970 | 3031 |
| | | | | | | 27% | 1754 | 2605 |
| | | | | | | 28% | 1166 | 1921 |
| | | | | | | 30% | 2378 | 3031 |
| | | | | | | 36% | 20 | 562 |
| | | | | | | 29% | 1244 | 1921 |
| | | | | | | 26% | 2210 | 3163 |
| | | | | | | 26% | 2210 | 3163 |
| | | | | | | 32% | 11 | 571 |
| | | | | | | 32% | 11 | 571 |
| | | | | | | 32% | 710 | 1204 |
| | | | | | | 32% | 11 | 562 |
| | | | | | | 32% | 710 | 1204 |
| | | | | | | 30% | 23 | 595 |
| | | | | | | 30% | 992 | 1630 |
| | | | | | | 32% | 710 | 1204 |
| | | | | | | 29% | 23 | 595 |
| | | | | | | 36% | 23 | 460 |
| | | | | | | 33% | 20 | 460 |
| | | | | | | 27% | 32 | 844 |
| | | | | | | 29% | 728 | 1387 |
| | | | | | | 30% | 983 | 1549 |
| | | | | | | 28% | 728 | 1387 |
| | | | | | | 31% | 713 | 1246 |
| | | | | | | 32% | 2657 | 3124 |
| | | | | | | 31% | 860 | 1387 |
| | | | | | | 30% | 518 | 1228 |
| | | | | | | 31% | 713 | 1246 |
| | | | | | | 33% | 713 | 1117 |
| | | | | | | 32% | 701 | 1114 |
| | | | | | | 32% | 113 | 574 |
| | | | | | | 32% | 113 | 574 |
| | | | | | | 31% | 2417 | 2983 |
| | | | | | | 30% | 1811 | 2242 |
| | | | | | | 32% | 2642 | 3109 |
| | | | | | | 34% | 80 | 460 |
| | | | | | | 32% | 1244 | 1639 |
| | | | | | | 33% | 701 | 1111 |
| | | | | | | 31% | 95 | 547 |
| | | | | | | 29% | 2219 | 2983 |
| | | | | | | 31% | 2681 | 3130 |
| | | | | | | 29% | 2618 | 3109 |
| | | | | | | 30% | 734 | 1171 |
| | | | | | | 31% | 1109 | 1537 |
| | | | | | | 32% | 80 | 451 |
| | | | | | | 31% | 2219 | 2761 |
| | | | | | | 32% | 725 | 1114 |
| | | | | | | 25% | 1721 | 2452 |
| | | | | | | 29% | 113 | 574 |
| | | | | | | 31% | 725 | 1114 |
| | | | | | | 28% | 1550 | 2113 |
| | | | | | | 26% | 2474 | 3319 |
| | | | | | | 30% | 1472 | 2026 |
| | | | | | | 27% | 1424 | 2113 |
| | | | | | | 25% | 2474 | 3100 |
| | | | | | | 25% | 1721 | 2452 |
| | | | | | | 27% | 1100 | 1639 |
| | | | | | | 29% | 893 | 1363 |
| | | | | | | 35% | 11 | 364 |
| | | | | | | 26% | 1721 | 2326 |
| | | | | | | 27% | 2555 | 3322 |
| | | | | | | 26% | 1721 | 2449 |
| | | | | | | 33% | 182 | 574 |
| | | | | | | 26% | 1100 | 1630 |
| | | | | | | 29% | 2549 | 2938 |
| | | | | | | 30% | 1997 | 2401 |
| | | | | | | 30% | 38 | 424 |
| | | | | | | 32% | 1241 | 1657 |
| | | | | | | 30% | 626 | 1015 |
| | | | | | | 30% | 734 | 1090 |
| | | | | | | 25% | 1250 | 1852 |
| | | | | | | 24% | 1250 | 1852 |
| | | | | | | 30% | 38 | 370 |
| | | | | | | 31% | 95 | 382 |
| | | | | | | 31% | 95 | 382 |
| | | | | | | 31% | 734 | 1090 |
| | | | | | | 26% | 1769 | 2464 |
| | | | | | | 31% | 725 | 1015 |
| | | | | | | 31% | 725 | 1015 |
| | | | | | | 29% | 1799 | 2056 |
| | | | | | | 25% | 1472 | 1882 |
| | | | | | | 30% | 593 | 847 |
| | | | | | | 22% | 371 | 598 |
| HLHCR16 | 965511 | 132 | HMMER | PFAM: Sushi domain | PF00084 | 357.8 | 197 | 358 |
| | | | 2.1.1 | (SCR repeat) | | | | |
| | | | blastx.2 | furrowed [Drosophila | gb\|AAB36703.1\| | 31% | 638 | 1480 |
| | | | | melanogaster] | | 28% | 254 | 1228 |
| | | | | | | 34% | 737 | 1387 |
| | | | | | | 28% | 254 | 1120 |
| | | | | | | 35% | 89 | 604 |
| | | | | | | 32% | 908 | 1468 |
| | | | | | | 34% | 692 | 1189 |
| | | | | | | 30% | 740 | 1270 |
| | | | | | | 30% | 419 | 1018 |
| | | | | | | 32% | 11 | 529 |
| | | | | | | 27% | 17 | 916 |
| | | | | | | 27% | 17 | 553 |
| | | | | | | 34% | 1100 | 1480 |
| | | | | | | 28% | 11 | 445 |
| | | | | | | 30% | 977 | 1480 |
| | | | | | | 37% | 365 | 571 |
| | | | | | | 29% | 1220 | 1489 |
| HFKJO15 | 910828 | 61 | HMMER | PFAM: Laminin EGF-like | PF00053 | 20.47 | 18 | 191 |
| | | | 1.8 | (Domains III and V) | | | | |
| | | | blastx.14 | acetyl LDL receptor | gi\|2723469\|dbj\|BAA | 51% | 12 | 539 |
| | | | | [Homo sapiens] | 24070.1\| | 46% | 69 | 191 |
| | | | | | | 38% | 12 | 152 |
| | | | | | | 41% | 78 | 200 |
| | | | | | | 41% | 99 | 191 |
| | | | | | | 36% | 417 | 539 |
| | | | | | | 48% | 465 | 539 |
| | | | | | | 38% | 78 | 170 |
| | | | | | | 36% | 63 | 152 |
| | | | | | | 40% | 246 | 326 |
| | | | | | | 35% | 246 | 329 |
| | | | | | | 37% | 381 | 461 |
| | | | | | | 50% | 12 | 71 |
| | | | | | | 33% | 246 | 335 |
| | | | | | | 33% | 276 | 356 |
| | | | | | | 36% | 474 | 539 |
| | | | | | | 44% | 12 | 65 |
| | | | | | | 29% | 150 | 260 |
| | | | | | | 46% | 381 | 425 |
| | | | | | | 31% | 183 | 287 |
| | | | | | | 40% | 246 | 305 |
| | | | | | | 42% | 378 | 440 |
| | | | | | | 50% | 285 | 326 |
| | | | | | | 45% | 111 | 170 |
| | | | | | | 24% | 285 | 395 |
| | | | | | | 26% | 381 | 470 |
| | | | | | | 40% | 243 | 287 |
| | | | | | | 42% | 420 | 476 |
| | | | | | | 40% | 330 | 374 |
| | | | | | | 50% | 510 | 539 |
| | | | | | | 62% | 3 | 26 |
| | | | | | | 31% | 6 | 71 |
| HMEIS32 | 1164006 | 62 | blastx.14 | Pistil extensin like | gi\|19917\|emb\|CAA | 32% | 123 | 197 |
| | | | | protein, partial CDS only | 78392.1\| | 100% | 1619 | 1639 |
| | | | | [Nicotiana tabacum] | | 66% | 675 | 701 |
| | | | | | | 41% | 1222 | 1272 |
| HMEIS32 | 911439 | 133 | HMMER | PFAM: Bacterial mutT | PF00293 | 5.47 | 255 | 389 |
| | | | 1.8 | protein | | | | |
| HOGDR01 | 1133383 | 63 | blastx.14 | (AC003965) SP001LA | gi\|2734092\|gb\|AAB | 100% | 242 | 967 |
| | | | | [Homo sapiens] | 93671.1\| | | | |
| HOGDR01 | 919899 | 134 | HMMER | PFAM: Trypsin | PF00089 | 322.84 | 171 | 881 |
| | | | 1.8 | | | | | |
| | | | blastx.2 | SP001LA (FRAGMENT). | sp\|O43342\|O43342 | 99% | 165 | 890 |
| HOGDR01 | 947085 | 135 | HMMER | PFAM:Trypsin | PF00089 | 320.16 | 161 | 871 |
| | | | 1.8 | | | | | |
| | | | blastx.2 | (AC003965) SP001LA | gb\|AAB93671.1\| | 99% | 155 | 967 |
| | | | | [Homo sapiens] | | | | |
| HISBG28 | 920850 | 136 | HMMER | PFAM: 3′5′-cyclic | PF00233 | 195.7 | 187 | 789 |
| | | | 2.1.1 | nucleotide | | | | |
| | | | | phosphodiesterase | | | | |
| | | | blastx.2 | 3′,5′-cyclic-AMP | pir\|A47286\|A47286 | 90% | 1 | 804 |
| | | | | phosphodiesterase (EC | | | | |
| | | | | 3.1.4.-) - human | | | | |
| | | | | (fragment) | | | | |
| HBJIG82 | 1151379 | 65 | blastx.14 | similar to Drosophila | gi\|1503988\|dbj\|BAA | 100% | 43 | 282 |
| | | | | melanogaster septin | 13193.1\| | 94% | 280 | 396 |
| | | | | (sep2). [Homo sapiens] | | | | |
| HBJIG82 | 924605 | 137 | HMMER | PFAM: Cell division | PF00735 | 296.9 | 36 | 632 |
| | | | 2.1.1 | protein | | | | |
| | | | blastx.2 | Sep2 (Fragment). | sp\|AAG09408\|AAG09408 | 83% | 36 | 953 |
| HBMXS88 | 1162642 | 66 | blastx.14 | (AF151811) CGJ-53 | gi\|4929575\|gb\|AAD | 98% | 281 | 754 |
| | | | | protein [Homo sapiens] | 34048.1\|AF151811_1 | 100% | 749 | 1060 |
| | | | | | | 100% | 1121 | 1357 |
| | | | | | | 100% | 49 | 258 |
| HBMXS88 | 926722 | 138 | HMMER | PFAM: Bacterial mutT | PF00293 | 3.8 | 312 | 371 |
| | | | 1.8 | protein | | | | |
| | | | blastx.14 | (AF151811) CGI-53 | gi\|4929575\|gb\|AAD3 | 97% | 69 | 494 |
| | | | | protein [Homo sapiens] | 4048.1\|AF151811_1 | 92% | 739 | 819 |
| | | | | | | 78% | 642 | 737 |
| | | | | | | 62% | 482 | 553 |
| | | | | | | 48% | 767 | 847 |
| HE8UL90 | 942749 | 139 | HMMER | PFAM: EGF-like domain | PF00008 | 63.9 | 297 | 398 |
| | | | 2.1.1 | | | | | |
| | | | blastx.2 | CRUMBS HOMOLOG 1. | sp\|P82279\|P82279 | 85% | 78 | 566 |
| | | | | | | 36% | 153 | 566 |
| | | | | | | 33% | 156 | 566 |
| | | | | | | 32% | 156 | 575 |
| | | | | | | 34% | 156 | 566 |
| | | | | | | 32% | 156 | 512 |
| | | | | | | 34% | 156 | 521 |
| | | | | | | 31% | 156 | 452 |
| | | | | | | 36% | 237 | 518 |
| | | | | | | 32% | 177 | 512 |
| | | | | | | 32% | 156 | 410 |
| | | | | | | 53% | 541 | 732 |
| | | | | | | 42% | 533 | 688 |
| | | | | | | 37% | 414 | 566 |
| | | | | | | 34% | 246 | 428 |
| | | | | | | 37% | 544 | 663 |
| | | | | | | 42% | 607 | 663 |
| | | | | | | 36% | 156 | 230 |
| | | | | | | 38% | 604 | 666 |
| | | | | | | 28% | 547 | 663 |
| | | | | | | 35% | 604 | 663 |
| | | | | | | 33% | 604 | 666 |
| | | | | | | 44% | 610 | 663 |
| | | | | | | 29% | 533 | 682 |
| | | | | | | 46% | 566 | 601 |
| | | | | | | 31% | 417 | 512 |
| HWHGF95 | 947019 | 140 | HMMER | PFAM: Trypsin | PF00089 | 309.92 | 56 | 724 |
| | | | 1.8 | | | | | |
| | | | blastx.2 | (AF135026) kallikrein- | gb\|AAD26427.2\|AF | 93% | 35 | 742 |
| | | | | like protein 3 KLK-L3 | 135026_1 | | | |
| | | | | [Homo sapiens] | | | | |
| HNKAZ51 | 1152347 | 69 | blastx.14 | (AF064819) serine | gi\|6137097\|gb\|AAF | 55% | 181 | 879 |
| | | | | protease DESC1 [Homo | 04328.1\|AF064819_1 | | | |
| | | | | sapiens] | | | | |
| HNKAZ51 | 947067 | 141 | HMMER | PFAM: Trypsin | PF00089 | 124.58 | 259 | 594 |
| | | | 1.8 | | | | | |
| | | | blastx.2 | (AF064819) serine | gb\|AAF04328.1\|AF | 42% | 100 | 603 |
| | | | | protease DESC1 [Homo | 064819_1 | 35% | 677 | 832 |
| | | | | sapiens] | | 46% | 603 | 686 |
| HFKKE19 | 1127465 | 70 | blastx.14 | Similar to D.melanogaster | gi\|1665821\|dbj\|BAA | 99% | 8 | 316 |
| | | | | cadherin-related tumor | 13407.1 | 30% | 287 | 394 |
| | | | | suppressor [Homo | | 33% | 503 | 547 |
| | | | | sapiens] | | | | |
| HFKKE19 | 947418 | 142 | HMMER | PFAM: EGF-like domain | PF00008 | 19.3 | 40 | 201 |
| | | | 1.8 | | | | | |
| | | | blastx.2 | MEGF3 (FRAGMENT). | sp\|Q9QYP2\|Q9QYP2 | 98% | 1 | 249 |
| | | | | | | 78% | 233 | 289 |
| | | | | | | 28% | 248 | 289 |
| HILBH66 | 1048931 | 71 | blastx.2 | integrin alpha-E chain - | pir\|A53213\|A53213 | 98% | 131 | 439 |
| | | | | human | | 83% | 80 | 151 |
| HILBH66 | 948844 | 143 | HMMER | PFAM: Integrins alpha | PF00357 | 47.26 | 160 | 363 |
| | | | 1.8 | chain | | | | |
| | | | blastx.2 | HUMINAE (Fragment). | sp\|AAF43107\|AAF43107 | 76% | 130 | 414 |
| | | | | | | 83% | 79 | 150 |
| HWMEQ37 | 949568 | 144 | HMMER | PFAM: Low-density | PF00057 | 30.2 | 388 | 459 |
| | | | 2.1.1 | lipoprotein receptor | | | | |
| | | | | domain class A | | | | |
| HFKHD91 | 1165344 | 73 | blastx.14 | (AF131842) Unknown | gi\|4406683\|gb\|AAD | 52% | 120 | 278 |
| | | | | [Homo sapiens] | 20057.1\| | 60% | 9 | 92 |
| HFKHD91 | 951259 | 145 | HMMER | PFAM: EGF-like domain | PF00008 | 28.84 | 119 | 211 |
| | | | 1.8 | | | | | |
| | | | blastx.2 | Netrin-Glc. | sp\|BAB12008\|BAB | 93% | 2 | 286 |
| | | | | | 12008 | | | |
| HUSXE73 | 1127979 | 74 | blastx.14 | (AF186111) NOTCH4- | gi\|6014628\|gb\|AAF | 100% | 360 | 863 |
| | | | | like protein [Homo | 01429.1\|AF186111_1 | 95% | 242 | 364 |
| | | | | sapiens] | | | | |
| HUSXE73 | 953246 | 146 | HMMER | PFAM: EGF-like domain | PF00008 | 39.2 | 466 | 573 |
| | | | 2.1.1 | | | | | |
| | | | blastx.2 | NOTCH4-LIKE | sp\|Q9UHF1\|Q9UHF1 | 100% | 361 | 864 |
| | | | | PROTEIN. | | 65% | 243 | 473 |
| HNFCS26 | 899406 | 75 | HMMER | PFAM: 7 transmembrane | PF00002 | 249.7 | 146 | 853 |
| | | | 2.1.1 | receptor (Secretin family) | | | | |
| | | | blastx.2 | (AC004262) R29368_2 | gb\|AAC05172.1\| | 81% | 137 | 955 |
| | | | | [Homo sapiens] | | | | |
| HNFCS26 | 956682 | 147 | blastx.2 | (AC004262) R293682 | gb\|AAC05172.1\| | 80% | 324 | 554 |
| | | | | [Homo sapiens] | | 90% | 169 | 324 |
| | | | | | | 52% | 208 | 267 |
| | | | | | | 56% | 143 | 190 |
| HNFCS26 | 956684 | 149 | HMMER | PFAM: Latrophilin/CL-1- | PF01825 | 23.7 | 1282 | 1151 |
| | | | 2.1.1 | like GPS domain | | | | |
| | | | blastx.2 | (AF114491) EGF-like | gb\|AAF21974.1\|AF | 81% | 1109 | 1978 |
| | | | | module EMR2 [Homo | 114491_1 | 48% | 75 | 419 |
| | | | | sapiens] | | 25% | 159 | 1088 |
| | | | | | | 31% | 132 | 425 |
| | | | | | | 29% | 153 | 443 |
| | | | | | | 70% | 1341 | 1370 |
| HCE3H08 | 959861 | 76 | HMMER | PFAM: Bacterial mutT | PF00293 | 33.27 | 273 | 392 |
| | | | 1.8 | protein | | | | |
| | | | blastx.14 | (AF062529) | gi\|3978224\|gb\|AAC | 73% | 174 | 641 |
| | | | | diphosphoinositol | 83224.1\| | | | |
| | | | | polyphosphate | | | | |
| | | | | phosphohydrolase [Homo | | | | |
| | | | | sapiens] | | | | |
| HETKR83 | 963274 | 150 | HMMER | PFAM: EGF-Iike domain | PF00008 | 41.8 | 236 | 319 |
| | | | 2.1.1 | | | | | |
| | | | blastx.2 | Wnt inhibitory factor-1 - | pir\|A59180\|A59180 | 88% | 20 | 445 |
| | | | | human | | 35% | 20 | 325 |
| | | | | | | 34% | 29 | 319 |
| HCUAZ04 | 965585 | 151 | HMMER | PFAM: | PF01557 | 100.2 | 495 | 292 |
| | | | 2.1.1 | Fumarylacetoacetate | | | | |
| | | | | (FAA) hydrolase family | | | | |
| | | | blastx.2 | CGI-105 PROTEIN. | sp\|Q9Y3B0\|Q9Y3B0 | 91% | 546 | 214 |
| HCE3J83 | 968823 | 79 | HMMER | PFAM: Bacterial mutT | PF00293 | 6.52 | 356 | 385 |
| | | | 1.8 | protein | | | | |
| | | | blastx.14 | (AF044588) protein | gi\|2865521\|gb\|AAC | 98% | 293 | 541 |
| | | | | regulating cytokinesis 1; | 02688.1\| | | | |
| | | | | PRC1 [Homo sapiens] | | | | |
| HAPOI67 | 971184 | 80 | HMMER | PFAM: 7 transmembrane | PF00002 | 280.3 | 1084 | 1842 |
| | | | 2.1.1 | receptor (Secretin family) | | | | |
| | | | blastx.2 | (AF114491) EGF-like | gb\|AAF21974.1\|AF | 52% | 124 | 1944 |
| | | | | module EMR2 [Homo | 114491_1 | 48% | 40 | 384 |
| | | | | sapiens] | | 70% | 1307 | 1336 |
| HE8NI05 | 971303 | 152 | HMMER | PEAM: Low-density | PF00057 | 59.46 | 307 | 417 |
| | | | 1.8 | lipoprotein receptor | | | | |
| | | | | domain class A | | | | |
| | | | blastx.2 | (AF166350) ST7 protein | gb\|AAD44360.1\|AF1 | 97% | 106 | 597 |
| | | | | [Homo sapiens] | 66350_1 | 45% | 193 | 411 |
| | | | | | | 48% | 283 | 411 |
| | | | | | | 43% | 632 | 766 |
| | | | | | | 52% | 579 | 653 |
| | | | | | | 39% | 118 | 186 |
| HHENW06 | 971310 | 153 | HMMER | PFAM: EGF-like domain | PF00008 | 35.6 | 852 | 965 |
| | | | 2.1.1 | | | | | |
| | | | blastx.2 | hypothetical protein | pir\|T17298\|T17298 | 98% | 17 | 334 |
| | | | | DKFZp586M2123.1 - | | 85% | 840 | 1181 |
| | | | | human (fragment) | | 38% | 786 | 1106 |
| | | | | | | 38% | 32 | 331 |
| | | | | | | 85% | 488 | 583 |
| | | | | | | 32% | 870 | 1181 |
| | | | | | | 39% | 798 | 1085 |
| | | | | | | 41% | 840 | 1049 |
| | | | | | | 40% | 783 | 938 |
| | | | | | | 26% | 840 | 1187 |
| | | | | | | 36% | 26 | 172 |
| | | | | | | 42% | 23 | 148 |
| | | | | | | 32% | 29 | 193 |
| | | | | | | 30% | 74 | 193 |
| | | | | | | 40% | 975 | 1049 |
| HNSMB24 | 971537 | 83 | HMMER | PFAM: Trypsin | PF00089 | 74.77 | 405 | 578 |
| | | | 1.8 | | | | | |
| | | | blastx.2 | MOSAIC SERINE | sp\|Q9QY82\|Q9QY82 | 40% | 33 | 677 |
| | | | | PROTEASE | | | | |
| | | | | EPITHELIASIN. | | | | |
| HLMDO77 | 974855 | 84 | HMMER | PFAM: Trypsin | PF00089 | 114.97 | 116 | 523 |
| | | | 1.8 | | | | | |
| | | | blastx.2 | Complement Clr-like | sp\|AAF44349\|AAF44349 | 100% | 116 | 547 |
| | | | | proteinase precursor. | | | | |
| HRDBE43 | 894862 | 85 | HMMER | PFAM: Laminin G | PF00054 | 195.2 | 191 | 580 |
| | | | 2.1.1 | domain | | | | |
| | | | blastx.2 | CG8403 PROTEIN. | sp″Q9V714\|Q9V714 | 33% | 2 | 1288 |
| | | | | | | 37% | 35 | 823 |
| | | | | | | 36% | 764 | 1285 |
| | | | | | | 26% | 173 | 607 |
| | | | | | | 47% | 686 | 730 |
| HRDBE43 | 947966 | 155 | HMMER | PFAM: Laminin G | PF00054 | 102.93 | 1023 | 661 |
| | | | 1.8 | domain | | | | |
| | | | blastx.14 | perlecan [Mus musculus] | gi\|200296\|gb\|AAA | 46% | 963 | 640 |
| | | | | | 39911.1\| | 31% | 1627 | 1250 |
| | | | | | | 38% | 1624 | 1361 |
| | | | | | | 38% | 1630 | 1379 |
| | | | | | | 40% | 966 | 715 |
| | | | | | | 32% | 957 | 661 |
| | | | | | | 72% | 1696 | 1643 |
| | | | | | | 41% | 1203 | 1132 |
| | | | | | | 47% | 1840 | 1772 |
| | | | | | | 33% | 1182 | 1111 |
| | | | | | | 50% | 1242 | 1189 |
| | | | | | | 47% | 1834 | 1784 |
| | | | | | | 45% | 1867 | 1796 |
| | | | | | | 47% | 1864 | 1814 |
| | | | | | | 57% | 1182 | 1141 |
| | | | | | | 53% | 1834 | 1796 |
| | | | | | | 61% | 1020 | 982 |
| | | | | | | 44% | 1194 | 1141 |
| | | | | | | 50% | 1834 | 1793 |
| | | | | | | 63% | 1828 | 1796 |
| | | | | | | 66% | 1227 | 1201 |
| | | | | | | 53% | 1834 | 1796 |
| | | | | | | 46% | 1239 | 1201 |
| | | | | | | 47% | 1188 | 1138 |
| | | | | | | 31% | 1699 | 1643 |
| | | | | | | 40% | 1538 | 1494 |
| | | | | | | 66% | 1185 | 1159 |
| | | | | | | 54% | 1828 | 1796 |
| | | | | | | 45% | 1828 | 1796 |
| | | | | | | 60% | 1227 | 1198 |
| | | | | | | 27% | 1158 | 1060 |
| | | | | | | 42% | 1023 | 982 |
| HOGDR01 | 919899 | 86 | HMMER | PFAM: Trypsin | PF00089 | 322.84 | 171 | 881 |
| | | | 1.8 | | | | | |
| | | | blastx.2 | SP001LA (FRAGMENT). | sp\|O43342\|O43342 | 99% | 165 | 890 |
| HOGDR01 | 947085 | 156 | HMMER | PFAM: Trypsin | PF00089 | 320.16 | 161 | 871 |
| | | | 1.8 | | | | | |
| | | | blastx.2 | (AC003965) SP001LA | gb\|AAB93671.1\| | 99% | 155 | 967 |
| | | | | [Homo sapiens] | | | | |

[0055] Table 2 further characterizes certain encoded polypeptides of the invention, by providing the results of comparisons to protein and protein family databases. The first column provides a unique clone identifier, “Clone ID NO:”, corresponding to a cDNA clone disclosed in Table 1A. The second column provides the unique contig identifier, “Contig ID:” which allows correlation with the information in Table 1A. The third column provides the sequence identifier, “SEQ ID NO:”, for the contig polynucleotide sequences. The fourth column provides the analysis method by which the homology/identity disclosed in the Table was determined. The fifth column provides a description of the PFAM/NR hit identified by each analysis. Column six provides the accession number of the PFAM/NR hit disclosed in the fifth column. Column seven, score/percent identity, provides a quality score or the percent identity, of the hit disclosed in column five. Comparisons were made between polypeptides encoded by polynucleotides of the invention and a non-redundant protein database (herein referred to as “NR”), or a database of protein families (herein referred to as “PFAM”), as described below.

[0056] The NR database, which comprises the NBRF PIR database, the NCBI GenPept database, and the SIB SwissProt and TrEMBL databases, was made non-redundant using the computer program nrdb2 (Warren Gish, Washington University in Saint Louis). Each of the polynucleotides shown in Table 1A, column 3 (e.g., SEQ ID NO:X or the ‘Query’ sequence) was used to search against the NR database. The computer program BLASTX was used to compare a 6-frame translation of the Query sequence to the NR database (for information about the BLASTX algorithm please see Altshul et al., J. Mol. Biol. 215:403-410 (1990); and Gish and States, Nat. Genet. 3:266-272 (1993). A description of the sequence that is most similar to the Query sequence (the highest scoring ‘Subject’) is shown in column five of Table 2 and the database accession number for that sequence is provided in column six. The highest scoring ‘Subject’ is reported in Table 2 if (a) the estimated probability that the match occurred by chance alone is less than 1.0e-07, and (b) the match was not to a known repetitive element. BLASTX returns alignments of short polypeptide segments of the Query and Subject sequences which share a high degree of similarity; these segments are known as High-Scoring Segment Pairs or HSPs. Table 2 reports the degree of similarity between the Query and the Subject for each HSP as a percent identity in Column 7. The percent identity is determined by dividing the number of exact matches between the two aligned sequences in the HSP, dividing by the number of Query amino acids in the HSP and multiplying by 100. The polynucleotides of SEQ ID NO:X which encode the polypeptide sequence that generates an HSP are delineated by columns 8 and 9 of Table 2.

[0057] The PFAM database, PFAM version 2.1, (Sonnhammer et al., Nucl. Acids Res., 26:320-322, 1998)) consists of a series of multiple sequence alignments; one alignment for each protein family. Each multiple sequence alignment is converted into a probability model called a Hidden Markov Model, or HMM, that represents the position-specific variation among the sequences that make up the multiple sequence alignment (see, e.g., Durbin et al., Biological sequence analysis: probabilistic models of proteins and nucleic acids, Cambridge University Press, 1998 for the theory of HMMs). The program HMMER version 1.8 (Sean Eddy, Washington University in Saint Louis) was used to compare the predicted protein sequence for each Query sequence (SEQ ID NO:Y in Table 1A) to each of the HMMs derived from PFAM version 2.1. A HMM derived from PFAM version 2.1 was said to be a significant match to a polypeptide of the invention if the score returned by HMMER 1.8 was greater than 0.8 times the HMMER 1.8 score obtained with the most distantly related known member of that protein family. The description of the PFAM family which shares a significant match with a polypeptide of the invention is listed in column 5 of Table 2, and the database accession number of the PFAM hit is provided in column 6. Column 7 provides the score returned by HMMER version 1.8 for the alignment. Columns 8 and 9 delineate the polynucleotides of SEQ ID NO:X which encode the polypeptide sequence which show a significant match to a PFAM protein family.

[0058] As mentioned, columns 8 and 9 in Table 2, “NT From” and “NT To”, delineate the polynucleotides of “SEQ ID NO:X” that encode a polypeptide having a significant match to the PFAM/NR database as disclosed in the fifth column. In one embodiment, the invention provides a protein comprising, or alternatively consisting of, a polypeptide encoded by the polynucleotides of SEQ ID NO:X delineated in columns 8 and 9 of Table 2. Also provided are polynucleotides encoding such proteins, and the complementary strand thereto.

[0059] The nucleotide sequence SEQ ID NO:X and the translated SEQ ID NO:Y are sufficiently accurate and otherwise suitable for a variety of uses well known in the art and described further below. For instance, the nucleotide sequences of SEQ ID NO:X are useful for designing nucleic acid hybridization probes that will detect nucleic acid sequences contained in SEQ ID NO:X or the cDNA contained in Clone ID NO:Z. These probes will also hybridize to nucleic acid molecules in biological samples, thereby enabling immediate applications in chromosome mapping, linkage analysis, tissue identification and/or typing, and a variety of forensic and diagnostic methods of the invention. Similarly, polypeptides identified from SEQ ID NO:Y may be used to generate antibodies which bind specifically to these polypeptides, or fragments thereof, and/or to the polypeptides encoded by the cDNA clones identified in, for example, Table lA.

[0060] Nevertheless, DNA sequences generated by sequencing reactions can contain sequencing errors. The errors exist as misidentified nucleotides, or as insertions or deletions of nucleotides in the generated DNA sequence. The erroneously inserted or deleted nucleotides cause frame shifts in the reading frames of the predicted amino acid sequence. In these cases, the predicted amino acid sequence diverges from the actual amino acid sequence, even though the generated DNA sequence may be greater than 99.9% identical to the actual DNA sequence (for example, one base insertion or deletion in an open reading frame of over 1000 bases).

[0061] Accordingly, for those applications requiring precision in the nucleotide sequence or the amino acid sequence, the present invention provides not only the generated nucleotide sequence identified as SEQ ID NO:X, and a predicted translated amino acid sequence identified as SEQ ID NO:Y, but also a sample of plasmid DNA containing cDNA Clone ID NO:Z (deposited with the ATCC on Oct. 5, 2000, and receiving ATCC designation numbers PTA 2574 and PTA 2575; deposited with the ATCC on Jan. 5, 2001, and having depositor reference numbers TS-1, TS-2, AC-1, and AC-2; and/or as set forth, for example, in Table 1A, 6 and 7). The nucleotide sequence of each deposited clone can readily be determined by sequencing the deposited clone in accordance with known methods. Further, techniques known in the art can be used to verify the nucleotide sequences of SEQ ID NO:X.

[0062] The predicted amino acid sequence can then be verified from such deposits. Moreover, the amino acid sequence of the protein encoded by a particular clone can also be directly determined by peptide sequencing or by expressing the protein in a suitable host cell containing the deposited human cDNA, collecting the protein, and determining its sequence.

[0063] RACE Protocol For Recovery of Full-length Genes

[0064] Partial cDNA clones can be made full-length by utilizing the rapid amplification of cDNA ends (RACE) procedure described in Frohman, M. A., et al., Proc. Nat'l. Acad. Sci. USA, 85:8998-9002 (1988). A CDNA clone missing either the 5′ or 3′ end can be reconstructed to include the absent base pairs extending to the translational start or stop codon, respectively. In some cases, cDNAs are missing the start codon of translation, therefor. The following briefly describes a modification of this original 5′ RACE procedure. Poly A+ or total RNA is reverse transcribed with Superscript II (Gibco/BRL) and an antisense or complementary primer specific to the cDNA sequence. The primer is removed from the reaction with a Microcon Concentrator (Amicon). The first-strand cDNA is then tailed with dATP and terminal deoxynucleotide transferase (Gibco/BRL). Thus, an anchor sequence is produced which is needed for PCR amplification. The second strand is synthesized from the dA-tail in PCR buffer, Taq DNA polymerase (Perkin-Elmer Cetus), an oligo-dT primer containing three adjacent restriction sites (XhoI, SalI and ClaI) at the 5′ end and a primer containing just these restriction sites. This double-stranded EDNA is PCR amplified for 40 cycles with the same primers as well as a nested cDNA-specific antisense primer. The PCR products are size-separated on an ethidium bromide-agarose gel and the region of gel containing cDNA products the predicted size of missing protein-coding DNA is removed. cDNA is purified from the agarose with the Magic PCR Prep kit (Promega), restriction digested with XhoI or SalI, and ligated to a plasmid such as pBluescript SKII (Stratagene) at XhoI and EcoRV sites. This DNA is transformed into bacteria and the plasmid clones sequenced to identify the correct protein-coding inserts. Correct 5′ ends are confirmed by comparing this sequence with the putatively identified homologue and overlap with the partial cDNA clone. Similar methods known in the art and/or commercial kits are used to amplify and recover 3′ ends.

[0065] Several quality-controlled kits are commercially available for purchase. Similar reagents and methods to those above are supplied in kit form from Gibco/BRL for both 5′ and 3′ RACE for recovery of full length genes. A second kit is available from Clontech which is a modification of a related technique, SLIC (single-stranded ligation to single-stranded cDNA), developed by Dumas et al., Nucleic Acids Res., 19:5227-32 (1991). The major differences in procedure are that the RNA is alkaline hydrolyzed after reverse transcription and RNA ligase is used to join a restriction site-containing anchor primer to the first-strand cDNA. This obviates the necessity for the dA-tailing reaction which results in a polyT stretch that is difficult to sequence past.

[0066] An alternative to generating 5′ or 3′ cDNA from RNA is to use cDNA library double-stranded DNA. An asymmetric PCR-amplified antisense cDNA strand is synthesized with an antisense cDNA-specific primer and a plasmid-anchored primer. These primers are removed and a symmetric PCR reaction is performed with a nested cDNA-specific antisense primer and the plasmid-anchored primer.

[0067] RNA Ligase Protocol for Generating the 5 ′ or 3 ′ End Sequences to Obtain Full Length Genes

[0068] Once a gene of interest is identified, several methods are available for the identification of the 5′ or 3′ portions of the gene which may not be present in the original cDNA plasmid. These methods include, but are not limited to, filter probing, clone enrichment using specific probes and protocols similar and identical to 5′ and 3′ RACE. While the full length gene may be present in the library and can be identified by probing, a useful method for generating the 5′ or 3′ end is to use the existing sequence information from the original cDNA to generate the missing information. A method similar to 5′ RACE is available for generating the missing 5′ end of a desired full-length gene. (This method was published by Fromont-Racine et al., Nucleic Acids Res., 21(7):1683-1684 (1993)). Briefly, a specific RNA oligonucleotide is ligated to the 5′ ends of a population of RNA presumably containing full-length gene RNA transcript and a primer set containing a primer specific to the ligated RNA oligonucleotide and a primer specific to a known sequence of the gene of interest, is used to PCR amplify the 5′ portion of the desired full length gene which may then be sequenced and used to generate the full length gene. This method starts with total RNA isolated from the desired source, poly A RNA may be used but is not a prerequisite for this procedure. The RNA preparation may then be treated with phosphatase if necessary to eliminate 5′ phosphate groups on degraded or damaged RNA which may interfere with the later RNA ligase step. The phosphatase if used is then inactivated and the RNA is treated with tobacco acid pyrophosphatase in order to remove the cap structure present at the 5′ ends of messenger RNAs. This reaction leaves a 5′ phosphate group at the 5′ end of the cap cleaved RNA which can then be ligated to an RNA oligonucleotide using T4 RNA ligase. This modified RNA preparation can then be used as a template for first strand cDNA synthesis using a gene specific oligonucleotide. The first strand synthesis-reaction can then be used as a template for PCR amplification of the desired 5′ end using a primer specific to the ligated RNA oligonucleotide and a primer specific to the known sequence of the gene of interest. The resultant product is then sequenced and analyzed to confirm that the 5′ end sequence belongs to the relevant gene.

[0069] The present invention also relates to vectors or plasmids which include such DNA sequences, as well as the use of the DNA sequences. The material deposited with the ATCC (deposited with the ATCC on Oct. 5, 2000, and receiving ATCC designation numbers PTA 2574 and PTA 2575; deposited with the ATCC on Jan. 5, 2001, and receiving ATCC designation numbers TS-1, TS-2, AC-1, and AC-2; and/or as set forth, for example, in Table 1A, Table 6, or Table 7) is a mixture of cDNA clones derived from a variety of human tissue and cloned in either a plasmid vector or a phage vector, as described, for example, in Table 7. These deposits are referred to as “the deposits” herein. The tissues from which some of the clones were derived are listed in Table 7, and the vector in which the corresponding CDNA is contained is also indicated in Table 7. The deposited material includes cDNA clones corresponding to SEQ ID NO:X described, for example, in Table 1A (Clone ID NO:Z). A clone which is isolatable from the ATCC Deposits by use of a sequence listed as SEQ ID NO:X, may include the entire coding region of a human gene or in other cases such clone may include a substantial portion of the coding region of a human gene. Furthermore, although the sequence listing may in some instances list only a portion of the DNA sequence in a clone included in the ATCC Deposits, it is well within the ability of one skilled in the art to sequence the DNA included in a clone contained in the ATCC Deposits by use of a sequence (or portion thereof) described in, for example Tables 1A or 2 by procedures hereinafter further described, and others apparent to those skilled in the art.

[0070] Also provided in Table 7 is the name of the vector which contains the cDNA clone. Each vector is routinely used in the art. The following additional information is provided for convenience.

[0071] Vectors Lambda Zap (U.S. Pat. Nos. 5,128,256 and 5,286,636), Uni-Zap XR (U.S. Pat. Nos. 5,128, 256 and 5,286,636), Zap Express (U.S. Pat. Nos. 5,128,256 and 5,286,636), pBluescript (pBS) (Short, J. M. et al., Nucleic Acids Res. 16:7583-7600 (1988); Alting-Mees, M. A. and Short, J. M., Nucleic Acids Res. 17:9494 (1989)) and pBK (Alting-Mees, M. A. et al., Strategies 5:58-61 (1992)) are commercially available from Stratagene Cloning Systems, Inc., 11011 N. Torrey Pines Road, La Jolla, Calif., 92037. pBS contains an ampicillin resistance gene and pBK contains a neomycin resistance gene. Phagemid pBS may be excised from the Lambda Zap and Uni-Zap XR vectors, and phagemid pBK may be excised from the Zap Express vector. Both phagemids may be transformed into E. coli strain XL-1 Blue, also available from Stratagene.

[0072] Vectors pSportl, pCMVSport 1.0, pCMVSport 2.0 and pCMVSport 3.0, were obtained from Life Technologies, Inc., P. O. Box 6009, Gaithersburg, Md. 20897. All Sport vectors contain an ampicillin resistance gene and may be transformed into E. coli strain DH1OB, also available from Life Technologies. See, for instance, Gruber, C. E., et al., Focus 15:59- (1993). Vector lafmid BA (Bento Soares, Columbia University, New York, N.Y.) contains an ampicillin resistance gene and can be transformed into E. coli strain XL-1 Blue. Vector pCR® 2.1, which is available from Invitrogen, 1600 Faraday Avenue, Carlsbad, Calif. 92008, contains an ampicillin resistance gene and may be transformed into E. coli strain DH10B, available from Life Technologies. See, for instance, Clark, J. M., Nuc. Acids Res. 16:9677-9686 (1988) and Mead, D. et al., Bio/Technology 9: (1991).

[0073] The present invention also relates to the genes corresponding to SEQ ID NO:X, SEQ ID NO:Y, and/or the deposited clone (Clone ID NO:Z). The corresponding gene can be isolated in accordance with known methods using the sequence information disclosed herein. Such methods include preparing probes or primers from the disclosed sequence and identifying or amplifying the corresponding gene from appropriate sources of genomic material.

[0074] Also provided in the present invention are allelic variants, orthologs, and/or species homologs. Procedures known in the art can be used to obtain full-length genes, allelic variants, splice variants, full-length coding portions, orthologs, and/or species homologs of genes corresponding to SEQ ID NO:X or the complement thereof, polypeptides encoded by genes corresponding to SEQ ID NO:X or the complement thereof, and/or the cDNA contained in Clone ID NO:Z, using information from the sequences disclosed herein or the clones deposited with the ATCC. For example, allelic variants and/or species homologs may be isolated and identified by making suitable probes or primers from the sequences provided herein and screening a suitable nucleic acid source for allelic variants and/or the desired homologue.

[0075] The polypeptides of the invention can be prepared in any suitable manner. Such polypeptides include isolated naturally occurring polypeptides, recombinantly produced polypeptides, synthetically produced polypeptides, or polypeptides produced by a combination of these methods. Means for preparing such polypeptides are well understood in the art.

[0076] The polypeptides may be in the form of the secreted protein, including the mature form, or may be a part of a larger protein, such as a fusion protein (see below). It is often advantageous to include an additional amino acid sequence which contains secretory or leader sequences, pro-sequences, sequences which aid in purification, such as multiple histidine residues, or an additional sequence for stability during recombinant production.

[0077] The polypeptides of the present invention are preferably provided in an isolated form, and preferably are substantially purified. A recombinantly produced version of a polypeptide, including the secreted polypeptide, can be substantially purified using techniques described herein or otherwise known in the art, such as, for example, by the one-step method described in Smith and Johnson, Gene 67:31-40 (1988). Polypeptides of the invention also can be purified from natural, synthetic or recombinant sources using techniques described herein or otherwise known in the art, such as, for example, antibodies of the invention raised against the polypeptides of the present invention in methods which are well known in the art.

[0078] The present invention provides a polynucleotide comprising, or alternatively consisting of, the nucleic acid sequence of SEQ ID NO:X, and/or the cDNA sequence contained in Clone ID NO:Z. The present invention also provides a polypeptide comprising, or alternatively, consisting of, the polypeptide sequence of SEQ ID NO:Y, a polypeptide encoded by SEQ ID NO:X or a complement thereof, a polypeptide encoded by the cDNA contained in Clone ID NO:Z, and/or the polypeptide sequence encoded by a nucleotide sequence in SEQ ID NO:B as defined in column 6 of Table 1B. Polynucleotides encoding a polypeptide comprising, or alternatively consisting of the polypeptide sequence of SEQ ID NO:Y, a polypeptide encoded by SEQ ID NO:X, a polypeptide encoded by the cDNA contained in Clone ID NO:Z, and/or a polypeptide sequence encoded by a nucleotide sequence in SEQ ID NO:B as defined in column 6 of Table 1B are also encompassed by the invention. The present invention further encompasses a polynucleotide comprising, or alternatively consisting of, the complement of the nucleic acid sequence of SEQ ID NO:X, a nucleic acid sequence encoding a polypeptide encoded by the complement of the nucleic acid sequence of SEQ ID NO:X, and/or the cDNA contained in Clone ID NO:Z.

[0079] Moreover, representative examples of polynucleotides of the invention comprise, or alternatively consist of, one, two, three, four, five, six, seven, eight, nine, ten, or more of the sequences delineated in Table 1B column 6, or any combination thereof. Additional, representative examples of polynucleotides of the invention comprise, or alternatively consist of, one, two, three, four, five, six, seven, eight, nine, ten, or more of the complementary strand(s) of the sequences delineated in Table 1B column 6, or any combination thereof. In further embodiments, the above-described polynucleotides of the invention comprise, or alternatively consist of, sequences delineated in Table 1B, column 6, and have a nucleic acid sequence which is different from that of the BAC fragment having the sequence disclosed in SEQ ID NO:B (see Table 1B, column 5). In additional embodiments, the above-described polynucleotides of the invention comprise, or alternatively consist of, sequences delineated in Table 1B, column 6, and have a nucleic acid sequence which is different from that published for the BAC clone identified as BAC ID NO:A (see Table 1B, column 4). In additional embodiments, the above-described polynucleotides of the invention comprise, or alternatively consist of, sequences delineated in Table 1B, column 6, and have a nucleic acid sequence which is different from that contained in the BAC clone identified as BAC ID NO:A (see Table 1B, column 4). Polypeptides encoded by these polynucleotides, other polynucleotides that encode these polypeptides, and antibodies that bind these polypeptides are also encompassed by the invention. Additionally, fragments and variants of the above-described polynucleotides and polypeptides are also encompassed by the invention.

[0080] Further, representative examples of polynucleotides of the invention comprise, or alternatively consist of, one, two, three, four, five, six, seven, eight, nine, ten, or more of the sequences delineated in column 6 of Table 1B which correspond to the same Clone ID NO:Z (see Table 1B, column 1), or any combination thereof. Additional, representative examples of polynucleotides of the invention comprise, or alternatively consist of, one, two, three, four, five, six, seven, eight, nine, ten, or more of the complementary strand(s) of the sequences delineated in column 6 of Table 1B which correspond to the same Clone ID NO:Z (see Table 1B, column 1), or any combination thereof. In further embodiments, the above-described polynucleotides of the invention comprise, or alternatively consist of, sequences delineated in column 6 of Table 1B which correspond to the same Clone ID NO:Z (see Table 1B, column 1) and have a nucleic acid sequence which is different from that of the BAC fragment having the sequence disclosed in SEQ ID NO:B (see Table 1B, column 5). In additional embodiments, the above-described polynucleotides of the invention comprise, or alternatively consist of, sequences delineated in column 6 of Table 1B which correspond to the same Clone ID NO:Z (see Table 1B, column 1) and have a nucleic acid sequence which is different from that published for the BAC clone identified as BAC ID NO:A (see Table 1B, column 4). In additional embodiments, the above-described polynucleotides of the invention comprise, or alternatively consist of, sequences delineated in column 6 of Table 1B which correspond to the same Clone ID NO:Z (see Table 1B, column 1) and have a nucleic acid sequence which is different from that contained in the BAC clone identified as BAC ID NO:A (see Table 1B, column 4). Polypeptides encoded by these polynucleotides, other polynucleotides that encode these polypeptides, and antibodies that bind these polypeptides are also encompassed by the invention. Additionally, fragments and variants of the above-described polynucleotides and polypeptides are also encompassed by the invention.

[0081] Further, representative examples of polynucleotides of the invention comprise, or alternatively consist of, one, two, three, four, five, six, seven, eight, nine, ten, or more of the sequences delineated in column 6 of Table 1B which correspond to the same contig sequence identifer SEQ ID NO:X (see Table 1B, column 2), or any combination thereof. Additional, representative examples of polynucleotides of the invention comprise, or alternatively consist of, one, two, three, four, five, six, seven, eight, nine, ten, or more of the complementary strand(s) of the sequences delineated in column 6 of Table 1B which correspond to the same contig sequence identifer SEQ ID NO:X (see Table 1B, column 2), or any combination thereof. In further embodiments, the above-described polynucleotides of the invention comprise, or alternatively consist of, sequences delineated in column 6 of Table 1B which correspond to the same contig sequence identifer SEQ ID NO:X (see Table 1B, column 2) and have a nucleic acid sequence which is different from that of the BAC fragment having the sequence disclosed in SEQ ID NO:B (see Table 1B, column 5). In additional embodiments, the above-described polynucleotides of the invention comprise, or alternatively consist of, sequences delineated in column 6 of Table 1B which correspond to the same contig sequence identifer SEQ ID NO:X (see Table 1B, column 2) and have a nucleic acid sequence which is different from that published for the BAC clone identified as BAC ID NO:A (see Table 1B, column 4). In additional embodiments, the above-described polynucleotides of the invention comprise, or alternatively consist of, sequences delineated in column 6 of Table 1B which correspond to the same contig sequence identifer SEQ ID NO:X (see Table 1B, column 2) and have a nucleic acid sequence which is different from that contained in the BAC clone identified as BAC ID NO:A (See Table 1B, column 4). Polypeptides encoded by these polynucleotides, other polynucleotides that encode these polypeptides, and antibodies that bind these polypeptides are also encompassed by the invention. Additionally, fragments and variants of the above-described polynucleotides and polypeptides are also encompassed by the invention.

[0082] Moreover, representative examples of polynucleotides of the invention comprise, or alternatively consist of, one, two, three, four, five, six, seven, eight, nine, ten, or more of the sequences delineated in the same row of Table 1B column 6, or any combination thereof. Additional, representative examples of polynucleotides of the invention comprise, or alternatively consist of, one, two, three, four, five, six, seven, eight, nine, ten, or more of the complementary strand(s) of the sequences delineated in the same row of Table 1B column 6, or any combination thereof. In preferred embodiments, the polynucleotides of the invention comprise, or alternatively consist of, one, two, three, four, five, six, seven, eight, nine, ten, or more of the complementary strand(s) of the sequences delineated in the same row of Table 1B column 6, wherein sequentially delineated sequences in the table (i.e. corresponding to those exons located closest to each other) are directly contiguous in a 5′ to 3′ orientation. In further embodiments, above-described polynucleotides of the invention comprise, or alternatively consist of, sequences delineated in the same row of Table 1B, column 6, and have a nucleic acid sequence which is different from that of the BAC fragment having the sequence disclosed in SEQ ID NO:B (see Table 1B, column 5). In additional embodiments, the above-described polynucleotides of the invention comprise, or alternatively consist of, sequences delineated in the same row of Table 1B, column 6, and have a nucleic acid sequence which is different from that published for the BAC clone identified as BAC ID NO:A (see Table 1B, column 4). In additional embodiments, the above-described polynucleotides of the invention comprise, or alternatively consist of, sequences delineated in the same row of Table 1B, column 6, and have a nucleic acid sequence which is different from that contained in the BAC clone identified as BAC ID NO:A (see Table 1B, column 4). Polypeptides encoded by these polynucleotides, other polynucleotides that encode these polypeptides, and antibodies that bind these polypeptides are also encompassed by the invention.

[0083] In additional specific embodiments, polynucleotides of the invention comprise, or alternatively consist of, one, two, three, four, five, six, seven, eight, nine, ten, or more of the sequences delineated in column 6 of Table 1B, and the polynucleotide sequence of SEQ ID NO:X (e.g., as defined in Table 1B, column 2) or fragments or variants thereof. Polypeptides encoded by these polynucleotides, other polynucleotides that encode these polypeptides, and antibodies that bind these polypeptides are also encompassed by the invention.

[0084] In additional specific embodiments, polynucleotides of the invention comprise, or alternatively consist of, one, two, three, four, five, six, seven, eight, nine, ten, or more of the sequences delineated in column 6 of Table 1B which correspond to the same Clone ID NO:Z (see Table 1B, column 1), and the polynucleotide sequence of SEQ ID NO:X (e.g., as defined in Table 1A or 1B) or fragments or variants thereof. In preferred embodiments, the delineated sequence(s) and polynucleotide sequence of SEQ ID NO:X correspond to the same Clone ID NO:Z. Polypeptides encoded by these polynucleotides, other polynucleotides that encode these polypeptides, and antibodies that bind these polypeptides are also encompassed by the invention.

[0085] In further specific embodiments, polynucleotides of the invention comprise, or alternatively consist of, one, two, three, four, five, six, seven, eight, nine, ten, or more of the sequences delineated in the same row of column 6 of Table 1B, and the polynucleotide sequence of SEQ ID NO:X (e.g., as defined in Table 1A or 1B) or fragments or variants thereof. In preferred embodiments, the delineated sequence(s) and polynucleotide sequence of SEQ ID NO:X correspond to the same row of column 6 of Table 1B. Polypeptides encoded by these polynucleotides, other polynucleotides that encode these polypeptides, and antibodies that bind these polypeptides are also encompassed by the invention.

[0086] In additional specific embodiments, polynucleotides of the invention comprise, or alternatively consist of a polynucleotide sequence in which the 3′ 10 polynucleotides of one of the sequences delineated in column 6 of Table 1B and the 5′ 10 polynucleotides of the sequence of SEQ ID NO:X are directly contiguous. Nucleic acids which hybridize to the complement of these 20 contiguous polynucleotides under stringent hybridization conditions or alternatively, under lower stringency conditions, are also encompassed by the invention. Polypeptides encoded by these polynucleotides and/or nucleic acids, other polynucleotides and/or nucleic acids that encode these polypeptides, and antibodies that bind these polypeptides are also encompassed by the invention. Additionally, fragments and variants of the above-described polynucleotides, nucleic acids, and polypeptides are also encompassed by the invention.

[0087] In additional specific embodiments, polynucleotides of the invention comprise, or alternatively consist of, a polynucleotide sequence in which the 3′ 10 polynucleotides of one of the sequences delineated in column 6 of Table 1B and the 5′ 10 polynucleotides of a fragment or variant of the sequence of SEQ ID NO:X are directly contiguous Nucleic acids which hybridize to the complement of these 20 contiguous polynucleotides under stringent hybridization conditions or alternatively, under lower stringency conditions, are also encompassed by the invention. Polypeptides encoded by these polynucleotides and/or nucleic acids, other polynucleotides and/or nucleic acids encoding these polypeptides, and antibodies that bind these polypeptides are also encompassed by the invention. Additionally, fragments and variants of the above-described polynucleotides, nucleic acids, and polypeptides are also encompassed by the invention.

[0088] In specific embodiments, polynucleotides of the invention comprise, or alternatively consist of, a polynucleotide sequence in which the 3′ 10 polynucleotides of the sequence of SEQ ID NO:X and the 5′ 10 polynucleotides of the sequence of one of the sequences delineated in column 6 of Table 1B are directly contiguous. Nucleic acids which hybridize to the complement of these 20 contiguous polynucleotides under stringent hybridization conditions or alternatively, under lower stringency conditions, are also encompassed by the invention. Polypeptides encoded by these polynucleotides and/or nucleic acids, other polynucleotides and/or nucleic acids encoding these polypeptides, and antibodies that bind these polypeptides are also encompassed by the invention. Additionally, fragments and variants of the above-described polynucleotides, nucleic acids, and polypeptides are also encompassed by the invention.

[0089] In specific embodiments, polynucleotides of the invention comprise, or alternatively consist of, a polynucleotide sequence in which the 3′ 10 polynucleotides of a fragment or variant of the sequence of SEQ ID NO:X and the 5′ 10 polynucleotides of the sequence of one of the sequences delineated in column 6 of Table 1B are directly contiguous. Nucleic acids which hybridize to the complement of these 20 contiguous polynucleotides under stringent hybridization conditions or alternatively, under lower stringency conditions, are also encompassed by the invention. Polypeptides encoded by these polynucleotides and/or nucleic acids, other polynucleotides and/or nucleic acids encoding these polypeptides, and antibodies that bind these polypeptides are also encompassed by the invention. Additionally, fragments and variants of the above-described polynucleotides, nucleic acids, and polypeptides, are also encompassed by the invention.

[0090] In further specific embodiments, polynucleotides of the invention comprise, or alternatively consist of, a polynucleotide sequence in which the 3′ 10 polynucleotides of one of the sequences delineated in column 6 of Table 1B and the 5′ 10 polynucleotides of another sequence in column 6 are directly contiguous. Nucleic acids which hybridize to the complement of these 20 contiguous polynucleotides under stringent hybridization conditions or alternatively, under lower stringency conditions, are also encompassed by the invention. Polypeptides encoded by these polynucleotides and/or nucleic acids, other polynucleotides and/or nucleic acids encoding these polypeptides, and antibodies that bind these polypeptides are also encompassed by the invention. Additionally, fragments and variants of the above-described polynucleotides, nucleic acids, and polypeptides are also encompassed by the invention.

[0091] In specific embodiments, polynucleotides of the invention comprise, or alternatively consist of, a polynucleotide sequence in which the 3′ 10 polynucleotides of one of the sequences delineated in column 6 of Table 1B and the 5′ 10 polynucleotides of another sequence in column 6 corresponding to the same Clone ID NO:Z (see Table 1B, column 1) are directly contiguous. Nucleic acids which hybridize to the complement of these 20 lower stringency conditions, are also encompassed by the invention. Polypeptides encoded by these polynucleotides and/or nucleic acids, other polynucleotides and/or nucleic acids encoding these polypeptides, and antibodies that bind these polypeptides are also encompassed by the invention. Additionally, fragments and variants of the above-described polynucleotides, nucleic acids, and polypeptides are also encompassed by the invention.

[0092] In specific embodiments, polynucleotides of the invention comprise, or alternatively consist of, a polynucleotide sequence in which the 3′ 10 polynucleotides of one sequence in column 6 corresponding to the same contig sequence identifer SEQ ID NO:X (see Table 1B, column 2) are directly contiguous. Nucleic acids which hybridize to the complement of these 20 contiguous polynucleotides under stringent hybridization conditions or alternatively, under lower stringency conditions, are also encompassed by the invention. Polypeptides encoded by these polynucleotides and/or nucleic acids, other polynucleotides and/or nucleic acids encoding these polypeptides, and antibodies that bind these polypeptides are also encompassed by the invention. Additionally, fragments and variants of the above-described polynucleotides, nucleic acids, and polypeptides are also encompassed by the invention.

[0093] In specific embodiments, polynucleotides of the invention comprise, or alternatively consist of a polynucleotide sequence in which the 3′ 10 polynucleotides of one of the sequences delineated in column 6 of Table 1B and the 5′ 10 polynucleotides of another sequence in column 6 corresponding to the same row are directly contiguous. In preferred embodiments, the 3′ 10 polynucleotides of one of the sequences delineated in column 6 of Table 1B is directly contiguous with the 5′ 10 polynucleotides of the next sequential exon delineated in Table 1B, column 6. Nucleic acids which hybridize to the complement of these 20 contiguous polynucleotides under stringent hybridization conditions or alternatively, under lower stringency conditions, are also encompassed by the invention. Polypeptides encoded by these polynucleotides and/or nucleic acids, other polynucleotides and/or nucleic acids encoding these polypeptides, and antibodies that bind these polypeptides are also encompassed by the invention. Additionally, fragments and variants of the above-described polynucleotides, nucleic acids, and polypeptides are also encompassed by the invention.

[0094] Many polynucleotide sequences, such as EST sequences, are publicly available and accessible through sequence databases and may have been publicly available prior to conception of the present invention. Preferably, such related polynucleotides are specifically excluded from the scope of the present invention. Accordingly, for each contig sequence (SEQ ID NO:X) listed in the fourth column of Table 1A, preferably excluded are one or more polynucleotides comprising a nucleotide sequence described by the general formula of a−b, where a is any integer between 1 and the final nucleotide minus 15 of SEQ ID NO:X, b is an integer of 15 to the final nucleotide of SEQ ID NO:X, where both a and b correspond to the positions of nucleotide residues shown in SEQ ID NO:X, and where b is greater than or equal to a+14. More specifically, preferably excluded are one or more polynucleotides comprising a nucleotide sequence described by the general formula of a−b, where a and b are integers as defined in columns 4 and 5, respectively, of Table 3. In specific embodiments, the polynucleotides of the invention do not consist of at least one, two, three, four, five, ten, or more of the specific polynucleotide sequences referenced by the Genbank Accession No. as disclosed in column 6 of Table 3 (including for example, published sequence in connection with a particular BAC clone). In further embodiments, preferably excluded from the invention are the specific polynucleotide sequence(s) contained in the clones corresponding to at least one, two, three, four, five, ten, or more of the available material having the accession numbers identified in the sixth column of this Table (including for example, the actual sequence contained in an identified BAC clone). In no way is this listing meant to encompass all of the sequences which may be excluded by the general formula, it is just a representative example. All references available through these accessions are hereby incorporated by reference in their entirety.

TABLE 3

| Clone ID | SEQ ID | | EST Disclaimer | | |
|---|---|---|---|---|---|
| NO: Z | NO: X | Contig ID: | Range of a | Range of b | Accession #'s |
| HPLBY29 | 11 | 1041126 | 1-448 | 15-462 | R33914, R33970, AA367795, and |
| | | | | | AA368685. |
| HOUEU57 | 12 | 1102662 | 1-453 | 15-467 | |
| HNHFR39 | 13 | 1151373 | 1-778 | 15-792 | AI917132, AW270385, AI061313, |
| | | | | | AA714011, AA582554, AL042373, |
| | | | | | AA644090, AA602906, AI278972, |
| | | | | | AA315361, AW338860, AI962030, |
| | | | | | AA630854, AA704393, AA833875, |
| | | | | | AA833896, AI309059, AA485328, |
| | | | | | AI310464, AI340151, AA904211, |
| | | | | | AA084609, AL037714, AA158549, |
| | | | | | T71936, AA622801, AA613761, |
| | | | | | AA484892, AA557911, AL135357, |
| | | | | | AA534064, AW057873, AI254779, |
| | | | | | AW194325, AA862183, AI031759, |
| | | | | | AI653776, A1792092, AI821056, |
| | | | | | AI821805, A1279037, AC007842, |
| | | | | | AC006512, AC005229, AC007227, |
| | | | | | AC003982, AC002351, AC004466, |
| | | | | | AC007637, AL049779, AC002091, |
| | | | | | AL022311, AL009181, AP000689, |
| | | | | | AC005412, AC007917, Z99716, U47924, |
| | | | | | AC007731, AC005500, AC003669, |
| | | | | | Z95152, AC007384, AL050318, |
| | | | | | AL034548, AP000355, AC006057, |
| | | | | | AL137100, AL022323, AC005874, |
| | | | | | AF134471, AC006511, AL022313, |
| | | | | | AC002301, AC004148, AC005030, |
| | | | | | Z85987, AL136295, AL008726, |
| | | | | | AL049709, AL109627, AC007312, |
| | | | | | AC005566, AF067844, AC003029, |
| | | | | | AL035423, AC002369, U85195, |
| | | | | | AC005962, AC006251, AC004832, |
| | | | | | AL021878, AC004520, AL132712, |
| | | | | | AE000658, AC005318, AC009247, |
| | | | | | AC005527, AC002430, AC007371, |
| | | | | | AC007537, Z82206, AL049759, |
| | | | | | AC000065, AL078477, AC004757, |
| | | | | | AC005694, AL117258, AP000692, |
| | | | | | AL034420, AC007686, AC005513, |
| | | | | | U52112, AF064861, AC006530, |
| | | | | | AC002996, AC006211, AC007207, |
| | | | | | AP000030, AL079340, AC006449, |
| | | | | | Z85996, AC005529, AL021918, Z95114, |
| | | | | | AC005821, U91318, AL035405, |
| | | | | | AC002546, Z93242, AP000272, |
| | | | | | AJ229042, AC006312, AC007684, |
| | | | | | AL022476, AC005011, AL035422, |
| | | | | | AB003151, AC007551, AP000117, |
| | | | | | AF107885, AC002425, AC005952, |
| | | | | | U91321, AL031681, AP000557, |
| | | | | | AC005324, Z81369, AL049766, |
| | | | | | AP000251, AC005881, U80017, |
| | | | | | AL035555, AC004216, AC008545, |
| | | | | | AC007565, AC008134, AL133445, |
| | | | | | AC004975, AF001548, AC004067, |
| | | | | | AC003101, AC005071, AC004253, |
| | | | | | AP000104, AP000501, AC005031, |
| | | | | | AC004583, AP000697, AL049569, |
| | | | | | AL022316, AC005207, AL031118, |
| | | | | | AP000694, AP001053, AC006409, |
| | | | | | AC004686, AC005200, AC000025, |
| | | | | | Z83826, AC004922, Z93017, AL079295, |
| | | | | | AC004542, AC000353, AC001234, |
| | | | | | AC005592, AC004801, AL022312, |
| | | | | | AL031680, AL031848, AC002395, |
| | | | | | AF017104, AC005015, AC007011, |
| | | | | | AL133244, AC005370, AL049589, |
| | | | | | AC005225, AC004905, AC007216, |
| | | | | | AL034402, AC005519, AC003012, |
| | | | | | AC002310, Z95115, Z98304, AC000077, |
| | | | | | AC007421, AL031767, AL035667, |
| | | | | | AC004099, AP000031, AC002400, |
| | | | | | AC004526, U78027, AC004882, |
| | | | | | AP000505, AC005701, AL008627, |
| | | | | | AC005921, AC007055, AL031300, |
| | | | | | AL132987, AF196779, AC004647, |
| | | | | | AL022237, AC006333, Z97195, |
| | | | | | AC006958, AC007199, Z77249, Z93848, |
| | | | | | AC006077, AC006552, AL031295, |
| | | | | | AC008055, AL031228, AC007193, |
| | | | | | AL021154, L78833, AL022165, |
| | | | | | AC004382, AC005006, AL023807, |
| | | | | | AC004695, AC004996, AL022315, |
| | | | | | AC002115, AC006014, AF038458, |
| | | | | | AF222686, AC004962, AL109801, |
| | | | | | AF134726, AL133448, AC004551, |
| | | | | | AC005409, AC005736, AC007546, |
| | | | | | AL031589, AC005531, AL049839, |
| | | | | | AC005778, AL034549, AC004998, |
| | | | | | AL133245, AC005280, AC007057, |
| | | | | | AL021940, AL034429, Z98884, |
| | | | | | AC006441, AC006946, and AF111167. |
| HFATE17 | 14 | 1151475 | 1-626 | 15-640 | AA777680, AA169599, AA034126, |
| | | | | | AA700597, AA203604, T48068, |
| | | | | | AA203588, AA705412, W90403, T51449, |
| | | | | | W90143, AW304561, AW302848, |
| | | | | | AA704530, and AC004542. |
| HNGER43 | 15 | 699391 | 1-302 | 15-316 | AC007563, AC000030, AL023095, |
| | | | | | Z93928, AC002523, AC005035, |
| | | | | | AF043945, AL008634, and AC023328. |
| HWAAE95 | 16 | 1135294 | 1-1845 | 15-1859 | AA468322, AW151541, T05834, |
| | | | | | AI865213, AI452836, AI370475, |
| | | | | | AI521525, AA533408, AW075979, |
| | | | | | AW117860, AA720582, AI921706, |
| | | | | | AL041375, AW020150, AA013168, |
| | | | | | AL041924, AL041381, AA747375, |
| | | | | | AA829065, AA019973, AA809125, |
| | | | | | AI078409, AI524453, AA449997, |
| | | | | | AA904275, AI358384, AA577706, |
| | | | | | AA493808, AA584489, AA084439, |
| | | | | | T51832, AI061313, AA365586, |
| | | | | | AA828047, AA720732, AW238712, |
| | | | | | AA584765, AA604843, AI280535, |
| | | | | | AI343143, AA526414, AI859834, |
| | | | | | AI251576, AA579398, AA642809, |
| | | | | | AA812058, AL042113, AI860423, |
| | | | | | AL044489, AA644090, AI800426, |
| | | | | | AI583466, AW271917, AA665645, |
| | | | | | AI754037, AA420723, AA665449, |
| | | | | | AA523812, H93293, AI801563, |
| | | | | | AI249688, Z98743, AL049869, |
| | | | | | AD000092, AP000301, AC004832, |
| | | | | | AC005899, Z83826, AL049694, |
| | | | | | AP000045, AF134471, AC006251, |
| | | | | | AL049589, AC005913, AL049843, |
| | | | | | AP000053, AP000168, AC007437, |
| | | | | | AL050348, AC006039, AC007386, |
| | | | | | AL031622, AC003109, AC002126, |
| | | | | | AC002416, AL109656, Z83846, Z98256, |
| | | | | | AL049766, AC005081, AC020663, |
| | | | | | AF111169, AC007350, U95743, |
| | | | | | AC004009, AF038458, AF196972, |
| | | | | | AL035610, Z93244, AC003098, |
| | | | | | AC007395, AL109733, AP000121, |
| | | | | | AC009181, AC005755, AB014078, |
| | | | | | AC004263, AC007537, AC005754, |
| | | | | | AL031281, AC008123, AC004967, |
| | | | | | AC005666, AL031722, AP000514, |
| | | | | | AC005529, AC007193, AC002544, |
| | | | | | AL078581, AC002316, AC006312, |
| | | | | | AL035420, AC005516, AC004087, |
| | | | | | AL031297, Z95331, AC003035, |
| | | | | | AC009247, AP000113, AC003042, |
| | | | | | AL022721, AP000326, AC005527, |
| | | | | | AC006139, AP000169, AP000122, |
| | | | | | AP000054, AC006057, Z98200, |
| | | | | | AC005180, AC002347, X55448, |
| | | | | | AC004743, AC003956, AL034351, |
| | | | | | AP000065, AC000134, AL133448, |
| | | | | | Z99754, AC004817, Z82190, AC004464, |
| | | | | | AC004022, AC000120, AC007993, |
| | | | | | AL049709, AC008101, AL121576, |
| | | | | | AP000692, AP000152, AC004382, |
| | | | | | AL117340, AJ011712, AC000075, |
| | | | | | AC005006, AP000512, AC004383, |
| | | | | | AF045555, AC006241, AC003101, |
| | | | | | AC007637, AL133485, AC002381, |
| | | | | | AC005255, AL080243, AC005004, |
| | | | | | AC004752, AC004874, AL008631, |
| | | | | | AF134726, L78833, AP000300, |
| | | | | | AL049871, Y10196, AP000502, |
| | | | | | AL109627, AC007225, AC004984, |
| | | | | | AL022323, AC004841, AP000555, |
| | | | | | AC005164, AB015355, AC004799, |
| | | | | | AC002094, AC004755, Z49237, |
| | | | | | AC003043, AL023803, AC005318, |
| | | | | | AC005304, AC006271, AC006547, |
| | | | | | AC006597, AL031427, AF111168, |
| | | | | | AC004659, AL022328, AC005914, |
| | | | | | AC004992, AC006088, Z99943, |
| | | | | | AC005306, AP000289, AC006023, |
| | | | | | AC005971, AP000042, AP000110, |
| | | | | | AC005726, AL034548, AL034420, |
| | | | | | AL031587, AB004907, AP000103, |
| | | | | | AB019438, AL031005, AB023049, |
| | | | | | AC005553, AC006449, AC002301, |
| | | | | | AC002400, AC006948, Z82215, |
| | | | | | AL117354, AC004225, U80017, |
| | | | | | AC002044, AP000359, AC005736, |
| | | | | | AC003950, Y14768, AC004174, |
| | | | | | AL136295, AL035071, AC004525, |
| | | | | | AP000011, AC005031, AC002394, |
| | | | | | Z71183, AC002492, AC004000, |
| | | | | | AP000505, AF020515, AC005664, |
| | | | | | AP000501, AC005258, Z49154, |
| | | | | | AL031295, AC004858, AC009516, |
| | | | | | AC003036, AC005015, AC005037, |
| | | | | | AC015853, AC007377, U95090, |
| | | | | | AC005070, AC009498, AC008984, |
| | | | | | AC008044, AL009181, AC008040, |
| | | | | | AL031670, X54156, U94788, AC007298, |
| | | | | | AC016027, AC004797, AF088219, |
| | | | | | AC004821, AC005829, AL035659, |
| | | | | | AC005071, AL109963, AL121652, |
| | | | | | AF109907, AC005019, AC006430, |
| | | | | | AL049830, AC004655, Z83844, |
| | | | | | AF001549, AC006011, AF129756, |
| | | | | | AL024507, AL035683, AC005089, |
| | | | | | AP000696, AP001038, Z83840, |
| | | | | | AC006127, AC002314, AC006077, |
| | | | | | AC006013, AP000238, AC005060, |
| | | | | | AL035413, AL109952, and AL034421. |
| HMSGL27 | 17 | 638097 | 1-1599 | 15-1613 | AA287567, AA252404, AW249468, |
| | | | | | AA547979, AA601218, AA287570, |
| | | | | | AA569648, AA255853, AI986165, |
| | | | | | CI8751, AA505108, AA126763, |
| | | | | | AI732430, AI732458, AA127499, |
| | | | | | AA984187, AA814400, AI917132, |
| | | | | | AA714224, AA758277, AA085372, |
| | | | | | AI380617, AI669421, AA714110, |
| | | | | | AI040051, AL041894, AA610432, |
| | | | | | AI912401, AW021917, H80203, |
| | | | | | AI623764, AI923052, AI821044, |
| | | | | | AI354423, AA515728, AI679413, |
| | | | | | AI061313, AA604645, AA528390, |
| | | | | | AW270258, AA582554, AL079734, |
| | | | | | N32944, AA652868, AI206841, |
| | | | | | AI783911, AA569667, AA745653, |
| | | | | | AI962030, AA410788, AI733856, |
| | | | | | AI244127, AL040054, AW271917, |
| | | | | | AA579179, AI499954, AI569086, |
| | | | | | AI862716, AW020088, AI620585, |
| | | | | | AI885488, AI078409, AA584066, |
| | | | | | AI561060, AA284247, AL120343, |
| | | | | | AA828047, AA192293, AI801505, |
| | | | | | AW157005, AI189682, F24728, |
| | | | | | AA644090, AA862243, AI669589, |
| | | | | | AA228778, AA601278, AI335963, |
| | | | | | AI310343, R92640, AI755214, |
| | | | | | AA828867, A1754567, AA831345, |
| | | | | | AI754105, AA643770, AW088049, |
| | | | | | AA654874, AI809818, AI081147, |
| | | | | | AA598605, AL121016, AL121653, |
| | | | | | AL096791, AP000501, AP000011, |
| | | | | | AC005081, AP000212, AP000134, |
| | | | | | AC005746, L78810, AL008718, |
| | | | | | AL022316, AC004112, AC009516, |
| | | | | | AC005399, AC004883, AL031680, |
| | | | | | AL031432, AL035400, AC006480, |
| | | | | | AC006487, AP000552, AC005755, |
| | | | | | AL021397, AF196972, AC004967, |
| | | | | | AL008715, AF111168, AP000689, |
| | | | | | AC006023, AC004019, AC008040, |
| | | | | | AC004841, AP000030, AC006960, |
| | | | | | AC006312, AL034549, AL020997, |
| | | | | | AC005921, AC005725, AL133500, |
| | | | | | AC005231, U80017, AC007676, |
| | | | | | AL031228, AL034555, AC005726, |
| | | | | | AL050318, AC004834, AC002316, |
| | | | | | AC005412, AC005102, AC004686, |
| | | | | | AC005696, AC006262, AC006013, |
| | | | | | AF031078, AC005520, AF196969, |
| | | | | | AP000350, AC006120, AC007216, |
| | | | | | AF030876, AC006057, AC000052, |
| | | | | | AC006211, AL109628, AC004859, |
| | | | | | AL035659, AC007055, Z85986, |
| | | | | | AL078638, AC004033, AC004262, |
| | | | | | AC002492, AL122003, AL035458, |
| | | | | | AL109798, AF196779, AL022328, |
| | | | | | Z97054, AC004552, AC018633, |
| | | | | | AC006271, AL049872, AC005620, |
| | | | | | AC007011, AL080243, AC005274, |
| | | | | | AC002543, AC005722, AL121658, |
| | | | | | AC005786, AL031295, AC005874, |
| | | | | | AF134471, AC004655, AC007773, |
| | | | | | AP000557, AC004815, AC004832, |
| | | | | | AC005086, AL133353, AC007919, |
| | | | | | AC005694, AC005519, AC002425, |
| | | | | | AC006449, AC005209, Z95152, |
| | | | | | AL049539, AC000026, AC006511, |
| | | | | | AL031279, AC002476, AC005500, |
| | | | | | AC005288, AL035587, AC004000, |
| | | | | | AC007421, AL049795, AC007731, |
| | | | | | AC006441, AC007242, AC005058, |
| | | | | | Y18000, AL049569, AC005800, |
| | | | | | AC004983, AP000356, AC006277, |
| | | | | | AC008372, Z84487, AL022319, |
| | | | | | AC020663, AJ246003, U78027, |
| | | | | | AC002477, AF001549, AL022313, |
| | | | | | U89337, AC004685, AF053356, |
| | | | | | AL096701, AL117694, AL133163, |
| | | | | | AF134726, AC005480, AC005523, |
| | | | | | AC003965, AP001053, AF200465, |
| | | | | | AL031848, AC012384, AP000359, |
| | | | | | AC007370, AC002314, AC004447, |
| | | | | | AC005527, AC004813, AL031681, |
| | | | | | AC004263, Z86090, AJ003147, |
| | | | | | AL035422, AC004254, AC005531, |
| | | | | | AL022320, AC006323, AC003982, |
| | | | | | AC003070, AC002470, AC004887, |
| | | | | | AC002310, AC007376, M89651, |
| | | | | | AC006450, AC005031, AC006077, |
| | | | | | AC005342, AL049776, AC005952, |
| | | | | | AP000251, AP000346, AC004890, |
| | | | | | AL049636, AL121757, AC003950, |
| | | | | | AC004408, AC004386, AC005856, |
| | | | | | AC000081, AC005695, AL031311, |
| | | | | | AC005940, AC004150, AC007690, |
| | | | | | AC005529, AC007285, AC007308, |
| | | | | | AC004477, Z84466, AL024498, |
| | | | | | AC003957, AC007225, L44140, |
| | | | | | AC000003, AC004491, AC007999, |
| | | | | | AL022165, AP000555, AC005736, |
| | | | | | AC005037, AP000511, AC005778, |
| | | | | | AL031005, AC005821, AC007279, |
| | | | | | Z95116, AC005233, AP000694, |
| | | | | | AF190465, AP000245, AC004185, |
| | | | | | Z95113, AC005484, AC005763, |
| | | | | | AC005666, AL109801, AC002059, |
| | | | | | AL031575, AC004797, AC000353, |
| | | | | | AL139054, AC004216, U91326, U07563, |
| | | | | | AL021977, AL008582, AC005291, |
| | | | | | AC002301, AC005200, AC005057, |
| | | | | | AP000311, Z98750, AC004895, Z84469, |
| | | | | | AC004662, AC007386, and AL049766. |
| HKIXB77 | 18 | 1161224 | 1-1222 | 15-1236 | AI674873, AW023532, W17106, |
| | | | | | AI963720, AI334443, AI284640, |
| | | | | | AI305547, AL138265, AI249997, |
| | | | | | AL046409, AL041690, AI431303, |
| | | | | | AI305766, AW303196, AW274349, |
| | | | | | AW193265, AW301350, AL119691, |
| | | | | | AI754955, AL046205, AA521323, |
| | | | | | AI110770, AI345518, AI076616, |
| | | | | | AW327868, AL120687, AI270117, |
| | | | | | AA610491, AW419262, AI345654, |
| | | | | | AA126450, AW265393, AA521399, |
| | | | | | AI312309, AI281881, AW265385, |
| | | | | | AI064864, AI613280, AW270270, |
| | | | | | AI969436, AI133164, AA665330, |
| | | | | | AW028429, AL045053, AL138455, |
| | | | | | AA581903, AI754253, AA587604, |
| | | | | | AI798473, AI610159, AL120269, |
| | | | | | AL037683, AI801591, AI696962, |
| | | | | | AL046457, AL044940, AI053672, |
| | | | | | AI537506, AI350211, AA490183, |
| | | | | | AI732865, AL040921, AI754658, |
| | | | | | AL042853, AL039958, AW238278, |
| | | | | | AL042753, AW088846, AL079645, |
| | | | | | AL134972, AA720702, AW439558, |
| | | | | | AA680243, AI473943, AW276827, |
| | | | | | AI679782, AW021207, AA569471, |
| | | | | | AI732120, AW338086, AI289067, |
| | | | | | AW438643, AA649642, AI589230, |
| | | | | | F36273, AW021583, AI564454, |
| | | | | | AA491284, AI298710, AI559705, |
| | | | | | AA908687, AA526787, AW238583, |
| | | | | | AA164251, AW072923, AW029038, |
| | | | | | AA613227, AI799642, AW304584, |
| | | | | | AI619997, AA491814, AW270382, |
| | | | | | AW103758, AI345681, AI345675, |
| | | | | | AI358571, AW062724, AI368256, |
| | | | | | AW268300, AL119984, AW410400, |
| | | | | | AA947360, AW408717, AI539563, |
| | | | | | AA470969, AI355224, AI3797019, |
| | | | | | AA610493, AI564185, AL041146, |
| | | | | | AA631507, AI246796, AI375710, |
| | | | | | AI708009, AA652764, AI860020, |
| | | | | | AI888008, AI085719, AI471481, |
| | | | | | AW083402, AI610920, AI499938, |
| | | | | | AA493621, AI254615, AA630362, |
| | | | | | AI696955, AI890348, AI192631, |
| | | | | | AL038785, AI370094, AW406162, |
| | | | | | AW238542, AA857486, AI270559, |
| | | | | | AW340844, AL038703, AL118991, |
| | | | | | AA629992, AW276435, AI358229, |
| | | | | | AA483771, AW023672, AA468022, |
| | | | | | AA468131, AA551552, AA503475, |
| | | | | | AW088202, AL048925, AL038474, |
| | | | | | AI962050, AI370074, AI564496, |
| | | | | | AW148792, AI821271, AW193432, |
| | | | | | AI133102, AA862173, AI148277, |
| | | | | | AI688846, AA528679, AI469968, |
| | | | | | AW265009, AI341664, AW406755, |
| | | | | | AA640772, AA177061, AI224093, |
| | | | | | AW407578, AW162049, AI371070, |
| | | | | | AA482768, AA661948, AI929531, |
| | | | | | AI568678, AW102955, AA682912, |
| | | | | | AI623898, AI499134, AA652057, |
| | | | | | AI340453, AW406447, AA806796, |
| | | | | | AW302013, AA623002, AA469451, |
| | | | | | AI110688, AI339850, AI434706, |
| | | | | | AA483223, AI061334, AA503015, |
| | | | | | AA531372, AI053623, AA613203, |
| | | | | | AW162246, AW088616, AL121235, |
| | | | | | AI888518, AL042420, AA846876, |
| | | | | | AI679132, AW162489, AI623720, |
| | | | | | AI537955, AA507547, AI559251, |
| | | | | | AA584201, AA721056, AI355206, |
| | | | | | AI814735, AI761471, AW261871, |
| | | | | | AA679124, AA167055, AI457397, |
| | | | | | AW069769, AI053790, AI434695, |
| | | | | | AI734872, AI307201, AI281697, |
| | | | | | AA877817, AW072587, AW008952, |
| | | | | | AA713815, AA719805, AI570261, |
| | | | | | AW300625, AL080114, AP000501, |
| | | | | | AC004263, AL031311, AC002429, |
| | | | | | AL022302, AC005694, U85195, Z97054, |
| | | | | | AC005527, AC004816, AE000658, |
| | | | | | AL049795, AC005808, AC005089, |
| | | | | | AC005529, AC004929, AC005209, |
| | | | | | AC005777, AC004972, U66059, |
| | | | | | AC005921, AC006989, AC002470, |
| | | | | | AC002312, AC005701, AL049539, |
| | | | | | AC007298, AC002996, AC005154, |
| | | | | | AJ009610, AF123462, AC005046, |
| | | | | | U18391, AC005393, AF053356, |
| | | | | | AC006205, AF077058, AP000961, |
| | | | | | AL034420, AL031767, Z93241, D83989, |
| | | | | | AC010077, AL021808, Z85987, |
| | | | | | AC005699, AC002300, AC007546, |
| | | | | | AF200465, AF015149, AC005740, |
| | | | | | AL008718, AL008719, AF015151, |
| | | | | | AC008039, AF134726, AC007676, |
| | | | | | AC005358, AF015156, AC005086, |
| | | | | | AL035451, AL109623, AC003962, |
| | | | | | AC004825, AL078477, U91323, X54178, |
| | | | | | AC022517, AC007878, AL035455, |
| | | | | | AL021940, AP001060, AC003007, |
| | | | | | AL035089, AC003049, Z82210, |
| | | | | | AC008085, AB020859, X75335, |
| | | | | | AB020858, AC004593, AC006071, |
| | | | | | X54181, AP000280, AC008394, |
| | | | | | AL117258, AL022322, AL035681, |
| | | | | | AF190465, AL133448, AC004832, |
| | | | | | AC004990, AC002549, AC005327, |
| | | | | | AP000553, AL021391, AL031118, |
| | | | | | AC006128, AL078463, AC007899, |
| | | | | | AB026899, AC008101, AC006101, |
| | | | | | AC002394, AC005726, AJ011930, |
| | | | | | AC002347, AL008728, AP000039, |
| | | | | | AP000107, AC005682, AC006088, |
| | | | | | AF107258, AC007510, AL031281, |
| | | | | | AC002128, AC006057, AC012039, |
| | | | | | AC005913, AC005081, AL031054, |
| | | | | | X55925, AC002365, AC005102, |
| | | | | | AC006285, U18392, AL049745, |
| | | | | | AC007687, AL096712, AC007191, |
| | | | | | AC005695, AC004650, AP000555, |
| | | | | | AC005212, M37551, AC005332, |
| | | | | | AL121591, AL117256, AC007227, |
| | | | | | AF015157, X53550, Z86061, AC002310, |
| | | | | | AP001068, AC006960, U18394, |
| | | | | | AP001053, AL080243, AIF015147, |
| | | | | | AF111168, AC010382, X55926, X54180, |
| | | | | | U57007, U57005, AL022721, AC000379, |
| | | | | | AL121580, AL035458, AL033397, |
| | | | | | AC004019, U72787, AF165926, |
| | | | | | AC004526, AC003112, Z95115, U57006, |
| | | | | | AC006511, AC005486, AJ010770, |
| | | | | | AP000275, AC007057, AC005988, |
| | | | | | AJ003147, AC004998, AC007051, |
| | | | | | AL030996, AP000459, AL031650, |
| | | | | | AC006130, AC016831, AC002126, |
| | | | | | AC005696, AL031774, AL050318, |
| | | | | | AP000044, AP000105, AP000037, |
| | | | | | AL035086, AP000152, AC005231, |
| | | | | | AL121934, AC007919, Z70289, |
| | | | | | AL031012, AC008115, AC005104, |
| | | | | | Z97195, U63630, AL031280, U91326, |
| | | | | | AL121603, AC006581, AL049830, |
| | | | | | AC005531, AL079340, AC005015, |
| | | | | | AC004041, U18395, AP000500, |
| | | | | | AC006251, AC007030, I51997, |
| | | | | | AL021578, Z83840, AC007308, |
| | | | | | AC003075, U96629, AC003085, |
| | | | | | AF111169, AC005412, AC005796, |
| | | | | | Y18000, AC007666, AF126403, |
| | | | | | AD000092, AP000142, AL121915, |
| | | | | | AC005291, AC006530, AC006373, |
| | | | | | AL109618, U57009, AC006480, |
| | | | | | AC005242, X55931, AC005261, |
| | | | | | AP000962, AL031719, AC004381, |
| | | | | | AC005245, Z83849, AL132992, |
| | | | | | AC005632, AC007151, AL049766, |
| | | | | | AC004814, D84394, and AC006017. |
| HTNBM01 | 19 | 1207944 | 1-2888 | 15-2902 | N76151, N98639, N95698, N98646, |
| | | | | | AA298841, Z28624, N54699, and |
| | | | | | AW383079. |
| HBJGT92 | 20 | 1193035 | 1-1851 | 15-1865 | AI904002, AA469156, AA579296, |
| | | | | | T84928, AA613878, AI690474, |
| | | | | | AL037285, AA548492, AA133651, |
| | | | | | F18394, AA347830, AA279319, F18776, |
| | | | | | F31465, AA650183, AA133650, R91633, |
| | | | | | T06876, AA661554, A1752977, |
| | | | | | AF196972, AL035405, AL031680, |
| | | | | | AC005859, AF196779, AL035555, |
| | | | | | AC002456, AC004851, AL049589, |
| | | | | | AL132774, AC005515, AC007285, |
| | | | | | U91318, and AC007637. |
| HAGAT56 | 21 | 1218696 | 1-2004 | 15-2018 | AI014830, AA683268, AA403131, and |
| | | | | | AW772256. |
| HCFMG57 | 22 | 1205913 | 1-2478 | 15-2492 | AW378455, AW378475, AA865755, |
| | | | | | N32743, AI627210, AA521490, |
| | | | | | AI863026, AI475665, AI090241, |
| | | | | | AI131107, AI686842, AI955157, |
| | | | | | AI762812, AI953913, N34451, |
| | | | | | AW205599, AI809165, AA912720, |
| | | | | | AI693617, AA810228, AI817219, |
| | | | | | AI695046, AI381457, AW274030, |
| | | | | | AI521150, AI141883, AA742507, |
| | | | | | T08123, AA740430, H09272, AI968969, |
| | | | | | AI572995, AA283075, AA347459, |
| | | | | | AA832491, AI434727, AI270742, |
| | | | | | AI610832, AA836638, H85723, T58842, |
| | | | | | AA134255, T58825, T34522, AI983553, |
| | | | | | H09273, AA347458, AA835719, N55725, |
| | | | | | AA296687, AA134254, H85213, |
| | | | | | AI351833, N42860, N92942, AW103718, |
| | | | | | AA774947, A1276440, AW007262, |
| | | | | | AA514997, AA654384, R57698, |
| | | | | | AW351892, U95740, and AB007890. |
| HTEHS55 | 23 | 1195572 | 1-1162 | 15-1176 | AI669827, AI675110, AI916264, |
| | | | | | AI022830, AI003782, AA404248, |
| | | | | | AA404272, AI480396, AI819299, |
| | | | | | W68651, AA019330, AA644583, |
| | | | | | W60067, AW016873, AA401281, |
| | | | | | H26918, AI702463, D60528, D59970, |
| | | | | | AA903799, AA401283, C04408, C14658, |
| | | | | | T89454, AW369806, AA002068, R42519, |
| | | | | | AI138897, AA834487, AI695264, |
| | | | | | T89543, AA383388, AA974451, |
| | | | | | AI961900, Z41482, AA002198, |
| | | | | | AI432644, AI623302, AI432654, |
| | | | | | AI432653, AW081103, AI432650, |
| | | | | | AI432677, AI431307, AI431316, |
| | | | | | AI431230, AI431328, AI431353, |
| | | | | | AL045327, AI431312, AI432655, |
| | | | | | AI431310, AI431238, AW128900, |
| | | | | | AI431354, AI432666, AI431347, |
| | | | | | AL134524, AI431323, AI432647, |
| | | | | | AI432661, AI432675, AI431321, |
| | | | | | AI431315, AI431337, AI492519, |
| | | | | | AI431246, AI431243, U46344, AI431235, |
| | | | | | AI432651, AI791349, AI431255, |
| | | | | | AI432649, AI432674, AI431330, |
| | | | | | AI431241, AL042729, AI431248, |
| | | | | | AL042802, AI432672, AI432665, |
| | | | | | AL042842, AL042655, AL042508, |
| | | | | | AI431351, AL042931, AI431254, |
| | | | | | AL042853, AI431357, AI432662, |
| | | | | | AI431345, AL042533, AL043166, |
| | | | | | AW128884, AL047611, AI431346, |
| | | | | | AI432676, AI432673, AI432658, |
| | | | | | AL135012, AI431231, AI431257, |
| | | | | | AI500518, AI431247, AI431340, |
| | | | | | AI432645, AL042787, AI432657, |
| | | | | | AL042515, AL043295, AW128846, |
| | | | | | AI432664, AL042898, AL042832, |
| | | | | | AI431751, AL043091, AL040207, |
| | | | | | AI866786, AI431350, AL042488, |
| | | | | | AI492510, AI431318, AI492520, |
| | | | | | AL043089, AI432656, AI431314, |
| | | | | | AI866465, AI815232, AI801325, |
| | | | | | AI866691, AL046356, AI500523, |
| | | | | | AI538850, AL043321, AI887775, |
| | | | | | AI582932, AI590043, AI923989, |
| | | | | | AI872423, AI284517, AW194509, |
| | | | | | AI500706, AL045328, AI491776, |
| | | | | | AI445237, AI289791, AI926593, |
| | | | | | AW151138, AL043278, AI889189, |
| | | | | | AI521560, AW151974, AI500662, |
| | | | | | AI285417, A1539800, AI284509, |
| | | | | | AI582912, AW172723, AI538885, |
| | | | | | AI889168, AI440263, AI927233, |
| | | | | | AW058275, AI866573, AI633493, |
| | | | | | AI434256, AI355008, AI866469, |
| | | | | | AI434242, AI805769, AI888661, |
| | | | | | AI500714, AI284513, AI888118, |
| | | | | | AI285439, AI890472, AI859991, |
| | | | | | AI436429, AI623736, AI355779, |
| | | | | | AI889147, AI581033, AI371228, |
| | | | | | AW128897, AI491710, AI440252, |
| | | | | | AI440238, AI567971, AI924051, |
| | | | | | AI610557, AI860003, AI242736, |
| | | | | | AI539260, AI828574, AW129223, |
| | | | | | AI887499, AI539781, AI539707, |
| | | | | | AI702065, AI885949, AI285419, |
| | | | | | AI559957, AW089557, AI432643, |
| | | | | | AI521571, AI469775, AI866581, |
| | | | | | AW074057, AI567953, AI815150, |
| | | | | | AI889136, AI446495, AI889191, |
| | | | | | AI867068, AI952433, AI225248, |
| | | | | | AL042741, AL047675, AI358271, |
| | | | | | AI798359, AI872315, AI500665, |
| | | | | | AI932620, AI698352, AI282249, |
| | | | | | AI371229, AI371237, AI863037, |
| | | | | | AI815239, AI500659, AI436438, |
| | | | | | AI521228, AI433978, AI804505, Y17793, |
| | | | | | AF064854, AL133074, AL133053, |
| | | | | | AL133049, AL133076, AF019249, |
| | | | | | AL122101, AL133068, X84990, |
| | | | | | AL133020, AW473663, and AW628193. |
| HMUBI13 | 24 | 1189811 | 1-1334 | 15-1348 | AI341467, AI279873, AI815782, |
| | | | | | AI608966, AW162570, AW161752, |
| | | | | | AI357796, AW160967, AW303833, |
| | | | | | AA211700, AI081095, AI083998, |
| | | | | | AI309740, AI866956, AI083946, |
| | | | | | AW161216, AA428187, N26682, |
| | | | | | N39835, AA431956, AA428676, |
| | | | | | AI815401, H09215, H09158, AA928901, |
| | | | | | AA779040, AW243698, AA053174, |
| | | | | | AI363969, AI284640, AL046409, |
| | | | | | AI281881, AI431303, AW193265, |
| | | | | | AI679782, AI334443, AW301350, |
| | | | | | AW303196, AW274349, AI270117, |
| | | | | | AL041690, AI613280, AI110770, |
| | | | | | AI064864, AI345654, AW088202, |
| | | | | | AI631232, AL038785, AI963720, |
| | | | | | AL037683, AW419262, AW029038, |
| | | | | | AI017024, AI537506, AA490183, |
| | | | | | AA720702, AI457397, AW270270, |
| | | | | | AW406447, AW162049, AI962050, |
| | | | | | AI929531, AW088616, AW021583, |
| | | | | | AI339850, AA610491, F36273, |
| | | | | | AI754658, AL044940, AI570261, |
| | | | | | AA482711, AI904894, AA587604, |
| | | | | | AI471481, AI133164, AI625244, |
| | | | | | AW073470, AI754955, AI061334, |
| | | | | | AI349850, AI281697, AL138455, |
| | | | | | AI307201, F08612, AW238278, |
| | | | | | AW088846, AW193432, AA521323, |
| | | | | | AI688846, AI281903, AL120687, |
| | | | | | AI917271, AI918421, AI567674, |
| | | | | | AA857486, AI192631, AI286356, |
| | | | | | AW261871, AI350211, AW166815, |
| | | | | | AL119691, AA522942, AW072587, |
| | | | | | AA613227, AA713815, AL119984, |
| | | | | | AI446464, AW275719, AW302450, |
| | | | | | AW148792, AW079659, AW440836, |
| | | | | | AI732865, AI049722, AI251436, |
| | | | | | AA521399, AA837084, AW088058, |
| | | | | | AI539563, AI341664, AI610159, |
| | | | | | AA111909, AA350859, AI344844, |
| | | | | | AW410400, AI951863, AI251002, |
| | | | | | AW004911, AI499938, AA551503, |
| | | | | | AL045077, AA581903, AA469451, |
| | | | | | AL138265, AL039958, AW270382, |
| | | | | | AA744031, AI289067, AI471543, |
| | | | | | AI969436, AI053672, AA531372, |
| | | | | | AW406162, AI133636, AW438643, |
| | | | | | AW265170, AA652764, AW408717, |
| | | | | | AI375710, AA703891, AI590958, |
| | | | | | AI732186, AA846935, AI287528, |
| | | | | | AI370878, AA826303, AI305547, |
| | | | | | AI798473, AL040921, AI733755, |
| | | | | | AW276827, AI610607, AW276435, |
| | | | | | C05755, AI278997, AI358571, |
| | | | | | AA729721, C05986, AI830390, |
| | | | | | AI133262, AA610493, AW339568, |
| | | | | | AA810318, AI246796, H78195, |
| | | | | | AI345681, AA634227, AI345675, |
| | | | | | AL038474, N25296, AL031722, U18391, |
| | | | | | D83989, AF077058, AF015156, X75335, |
| | | | | | AF015151, I51997, U18395, X55925, |
| | | | | | U57009, U18392, AL008716, U12580, |
| | | | | | U18390, X54180, U18394, U57005, |
| | | | | | U18387, U57006, AF015147, X53550, |
| | | | | | U57008, X55931, AC004534, X54178, |
| | | | | | AF015157, X54175, X54181, X54179, |
| | | | | | X55926, U18393, U72787, AC006128, |
| | | | | | AF015160, U67801, AL121603, |
| | | | | | AL035450, U18398, X55924, X88791, |
| | | | | | AL096861, AL031054, AC007298, |
| | | | | | U18399, AF015167, AC005913, |
| | | | | | AF015158, AC002470, Z69666, |
| | | | | | AF015149, AP000459, AC008249, |
| | | | | | AL121591, Z49816, AB020859, X54176, |
| | | | | | AL049557, U12584, AC007243, A39972, |
| | | | | | AL136297, AF001549, AC007488, |
| | | | | | AC005154, X55932, AL049562, |
| | | | | | AC008064, X55922, AC004593, |
| | | | | | AC006251, AL022163, AL031734, |
| | | | | | AL049761, AC005324, AC005815, |
| | | | | | AC007099, AC004016, AL031311, |
| | | | | | U91328, AC007043, AL117256, |
| | | | | | AC002041, AC005541, AC006022, |
| | | | | | Z98051, AC000418, AL133399, |
| | | | | | AC006130, AL031224, Z22650, |
| | | | | | AC006292, AC004986, AC002564, |
| | | | | | AC003085, X55927, AC007682, |
| | | | | | AC005250, AC004987, AC006205, |
| | | | | | AP000193, AP000049, AL050097, |
| | | | | | AL031257, AL109853, AC006057, |
| | | | | | AC004626, AC004008, AC004821, |
| | | | | | AC000353, AP000311, AF015166, |
| | | | | | AL023755, AL031281, AC002430, |
| | | | | | AF227510, Z70042, AL023882, |
| | | | | | AC004381, AC004643, AP000117, |
| | | | | | AC006344, AC006312, AC004940, |
| | | | | | AC007384, AL121934, AL049647, |
| | | | | | Z68881, AL121748, AP000502, U67231, |
| | | | | | AC006045, AL008709, Z82210, |
| | | | | | AC004931, U12582, AC006960, |
| | | | | | AP000966, AC005603, AL031777, |
| | | | | | AL049643, AP000555, AC007091, |
| | | | | | U18400, AC004638, X55923, AC005940, |
| | | | | | AL031650, AC004837, AF134726, |
| | | | | | AC007510, AP000365, AC004690, |
| | | | | | Z84485, AL008728, AC008124, |
| | | | | | AL132994, AC005740, AP000548, |
| | | | | | AL096867, AJ003147, Z75741, |
| | | | | | AC007514, L04965, AL022316, Z84490, |
| | | | | | AC010722, AC006476, S75201, |
| | | | | | AF015162, AC005406, AC005785, |
| | | | | | AF039907, AC002429, AC005295, |
| | | | | | AF015165, AC001231, AC004808, |
| | | | | | AC007051, AC006352, AC004205, |
| | | | | | AC007252, AC006374, AF020503, |
| | | | | | AC009069, AC007919, AP000468, |
| | | | | | AC004637, AC005699, AC000159, |
| | | | | | AF015154, U66059, AC004979, |
| | | | | | AC007677, AC005046, AF027390, |
| | | | | | AL121578, AF010238, L35531, |
| | | | | | AL022397, AC004070, AC005692, |
| | | | | | AC002394, Z98046, AP000954, |
| | | | | | AC004901, AC006002, AC005808, |
| | | | | | AL035494, AC005229, AL109618, |
| | | | | | AL133246, AC004040, AP000298, |
| | | | | | AC007363, AP000044, AP000112, |
| | | | | | AC005412, AL049544, AC005820, |
| | | | | | AL049692, Z86061, AC003007, |
| | | | | | AL096712, AC006150, Z74696, |
| | | | | | AC004417, AJ011932, AC005242, |
| | | | | | AL031286, AL049829, AC010202, |
| | | | | | AL110292, AC005597, AC002549, |
| | | | | | AC004069, AL035407, AC004799, |
| | | | | | AC007227, U95742, AC004691, |
| | | | | | AC006271, AF015170, AC009516, |
| | | | | | AC003986, AC004603, AC005632, |
| | | | | | AC007226, AL035445, and AC007216. |
| HPCAO89 | 25 | 1137858 | 1-1525 | 15-1539 | AI391500. |
| HE2KN09 | 26 | 1163877 | 1-1357 | 15-1371 | AW409694, AW163484, AA524968, |
| | | | | | AW157422, AW409789, AW149826, |
| | | | | | AW439315, AI435067, AW082947, |
| | | | | | AI982972, AA855083, AW027529, |
| | | | | | AI081884, AW083431, AI004310, |
| | | | | | AI748899, AI188316, AI355876, |
| | | | | | AI302238, AI275061, AI459896, |
| | | | | | AA961666, AI139136, AI418038, |
| | | | | | AI079833, AI278587, AA488886, |
| | | | | | AA865815, AA865641, AW192032, |
| | | | | | AA708607, AI863272, AI420439, |
| | | | | | AI936078, AA662188, AI826981, |
| | | | | | AI140216, AA704357, AA662145, |
| | | | | | AI803886, R60985, AI199200, AI199350, |
| | | | | | AI202396, AA987295, AA085191, |
| | | | | | AI220804, AI122546, AI220749, |
| | | | | | AA365050, AA648815, T30457, |
| | | | | | AA642369, AA352082, AA255581, |
| | | | | | AI813408, AA935152, T17207, F35404, |
| | | | | | Z39091, AA262788, AA885886, |
| | | | | | AA476571, AA448893, AA916287, |
| | | | | | AI570692, AA769102, AW029199, |
| | | | | | AI921396, R55319, AW168622, |
| | | | | | AI358120, AF095446, AL096750, and |
| | | | | | AL049465. |
| HCWGE12 | 27 | 1171961 | 1-517 | 15-531 | |
| HCEPY32 | 28 | 1199930 | 1-2613 | 15-2627 | AA326530, AI590906, AA197019, |
| | | | | | AI284126, AL040054, T74524, |
| | | | | | AA640685, H73550, AI887235, |
| | | | | | AW304580, AI188522, AA643770, |
| | | | | | AI358712, AL038842, AI669589, |
| | | | | | AI306232, AA904211, AA578621, |
| | | | | | AA502532, AI284640, AA584862, |
| | | | | | AA127426, AI278972, AW274191, |
| | | | | | H29914, AA056248, AI962030, |
| | | | | | AW029515, AW103758, H05066, |
| | | | | | AA847427, AW302711, AA323644, |
| | | | | | AA533054, AA661573, AA847508, |
| | | | | | AA493226, AI798407, AI439393, |
| | | | | | AW275971, AI802087, AI633168, |
| | | | | | AA302812, AI675615, AI251576, |
| | | | | | AI144081, AW338508, AI961983, |
| | | | | | AA825827, AA502991, AA525293, |
| | | | | | AI417469, AI732690, AA595499, |
| | | | | | AI431513, AI499954, AI369580, |
| | | | | | AW302753, AW238253, AI245693, |
| | | | | | AA827383, AA503298, AA765925, |
| | | | | | AL120282, AI801505, AI635440, |
| | | | | | AA577755, AW150077, AA602906, |
| | | | | | AI523316, AA613761, AW303872, |
| | | | | | AA302971, AA775205, AA070899, |
| | | | | | AI984168, AW410784, AI583466, |
| | | | | | AW167330, AI823705, AI335995, |
| | | | | | AI824476, AA832175, AI568849, |
| | | | | | AW440368, N23913, AI076228, H07953, |
| | | | | | AA713705, AA663074, AL079734, |
| | | | | | AI277454, AI251696, AI049709, H63660, |
| | | | | | AI753672, AA832444, AI334896, |
| | | | | | AA515728, AA381138, AA719433, |
| | | | | | AI732710, AI732677, AI358343, |
| | | | | | AI005613, R98218, AI367473, AI732869, |
| | | | | | AA634786, AI889245, AA993636, |
| | | | | | AI925065, AA491814, AI205181, |
| | | | | | AI246996, AL137536, AC006512, |
| | | | | | AL008583, AC005971, AC000353, |
| | | | | | AC002980, AL031295, AC002300, |
| | | | | | AC002097, AC005512, AF111168, |
| | | | | | AL021397, AL133448, AL034374, |
| | | | | | AC004967, AL023575, Z93023, |
| | | | | | AL031846, AP000208, AP000130, |
| | | | | | AL109984, AL034420, AC002316, |
| | | | | | AL033527, AC005754, AL035652, |
| | | | | | AC004774, AC011625, U89335, |
| | | | | | AC005666, AC005746, AL031659, |
| | | | | | AC004491, AD000833, AC006023, |
| | | | | | AL133245, AL050331, AC004851, |
| | | | | | Z95331, AL049867, AP000252, |
| | | | | | AC004987, AC005907, AC004975, |
| | | | | | AL031283, AC007263, AL008735, |
| | | | | | AC003070, AP000692, Z69917, |
| | | | | | AC008012, AC004217, Z94721, |
| | | | | | AC002504, AC004999, Z98742, |
| | | | | | AC006480, AF146191, AP000247, |
| | | | | | AC006449, AC004634, AC005920, |
| | | | | | AC004887, AL121754, AL031584, |
| | | | | | AC002310, AP000289, AL021977, |
| | | | | | AC005996, AC007686, AC004526, |
| | | | | | AC006511, AL121603, AL031432, |
| | | | | | AP000355, AL031577, AD000671, |
| | | | | | AC005578, AC005763, AL132712, |
| | | | | | AC002477, AL133353, D87675, |
| | | | | | AC004760, AC002470, AC005231, |
| | | | | | AC006121, AC003006, AC006042, |
| | | | | | AC010205, AP000042, AP000110, |
| | | | | | AL022721, Z75746, AC005071, |
| | | | | | AC005015, AL021391, AC003043, |
| | | | | | AP000108, AP000040, AC005924, |
| | | | | | AL133485, AL031680, AC000090, |
| | | | | | AP000517, AL049653, AC006111, |
| | | | | | AC005243, AL008718, Z98743, |
| | | | | | AC006013, AL034548, AC005779, |
| | | | | | AC004741, AL023803, AL049694, |
| | | | | | AL022399, AC009247, U91323, |
| | | | | | AL096768, AC005048, Z82206, |
| | | | | | AC004520, AC007226, AC007191, |
| | | | | | AL031433, AC005901, AF196779, |
| | | | | | AP000555, Z98752, AC006312, |
| | | | | | AC009330, AC003002, AC005081, |
| | | | | | AC002544, AC006241, Z98949, |
| | | | | | AC004656, AB023054, AC002367, |
| | | | | | AC005216, AC006530, AC005412, |
| | | | | | AC003684, AC006538, AC005190, |
| | | | | | AC005031, AF001549, Z99716, |
| | | | | | AL096791, AC005255, AC007630, |
| | | | | | AC005358, AC007842, U66061, |
| | | | | | AC005067, AC006430, AC006236, |
| | | | | | AC002395, AC002412, AC004631, |
| | | | | | AC006211, AL078474, AC009891, |
| | | | | | AC000094, AC003029, AC002390, |
| | | | | | AL022320, AC005193, AL031770, |
| | | | | | AC003969, AC002299, Z70280, U91319, |
| | | | | | AL109963, AL035462, U80017, |
| | | | | | AC006255, AC006125, U07562, |
| | | | | | AP000553, AP000134, AP000212, |
| | | | | | AL109657, AC005911, AC006960, |
| | | | | | AL050341, AC005756, AC002563, |
| | | | | | AC009516, AC004983, Z94056, |
| | | | | | AP000207, AF165926, AC006016, |
| | | | | | AL035691, AC005520, AL022726, |
| | | | | | AC007546, AC005778, AC009802, |
| | | | | | AC005821, AC004913, AC007684, |
| | | | | | AC006468, AL009181, AP000503, |
| | | | | | AC003108, AB023049, AL031668, |
| | | | | | AC005952, AF091512, Z99943, |
| | | | | | AC007510, AC004929, AL049749, |
| | | | | | AC005726, AC007899, AC004382, |
| | | | | | AL035684, AC005261, AC003071, |
| | | | | | AC007688, AC005776, AL023880, |
| | | | | | AC007773, AC004832, AL031904, |
| | | | | | AC004087, AD000092, AC002073, |
| | | | | | AP000282, AL109758, Z93930, |
| | | | | | AC005519, AC005399, AC005829, |
| | | | | | AC004765, AL109613, AC002312, |
| | | | | | AC004148, Z97200, AC004989, |
| | | | | | AF135187, AP000010, and Z83844. |
| HSVCH37 | 29 | 1081035 | 1-236 | 15-250 | AB001632, I58533, I58528, AB015656, |
| | | | | | I58538, AJ004865, AF043731, D89094, |
| | | | | | L16545, and I58526. |
| HOFNL18 | 30 | 1204713 | 1-1676 | 15-1690 | AW079905, W72340, AI827569, N21556, |
| | | | | | AI669118, AW103945, AA495817, |
| | | | | | AA477583, AA495757, H15484, |
| | | | | | AI245484, AI921696, AI922971, |
| | | | | | AI561233, AA304945, AI654287, |
| | | | | | AA558780, R56490, AA357914, |
| | | | | | AA628687, AA355289, AA477457, |
| | | | | | AA832308, N79824, C14941, W73971, |
| | | | | | AI434108, AA806856, N41499, |
| | | | | | AA781710, AI372958, AA312114, |
| | | | | | AA341504, AI093765, AA341300, |
| | | | | | H57022, AA099228, AW450650, |
| | | | | | N40267, AW451773, AW236015, |
| | | | | | AW390225, AA385861, T10380, |
| | | | | | AA098883, AL080166, and AL031432. |
| HTOCG37 | 31 | 1189012 | 1-1349 | 15-1363 | AI884975, AW088080, AW246654, |
| | | | | | AW204224, AW138277, AA772919, |
| | | | | | AI366161, AA558898, AI381656, |
| | | | | | R40390, H17482, AA233993, Z17368, |
| | | | | | R45475, AI871516, AA513619, |
| | | | | | AA190710, AA191531, AA385883, |
| | | | | | AA280111, AA669493, AI740693, |
| | | | | | AL133979, AA626586, AI199985, |
| | | | | | AW361314, AA281756, AA860184, |
| | | | | | AI969999, AF079529, AF056490, |
| | | | | | AR025390, AL109778, AR025391, and |
| | | | | | AL109687. |
| HTEOF80 | 32 | 1143414 | 1-1712 | 15-1726 | R99817, AF186084, and AL117610. |
| HSLDP32 | 33 | 1182295 | 1-620 | 15-634 | |
| HAICQ62 | 34 | 1182256 | 1-1169 | 15-1183 | AI814314, AW361172, AW368430, |
| | | | | | AW368437, AI819230, AW361245, |
| | | | | | AI828999, AW361164, and AW368433. |
| HRDBE43 | 35 | 894862 | 1-1868 | 15-1882 | AI160324, AA420500, AW263972, |
| | | | | | AI206613, AI417744, AI953056, |
| | | | | | AA778217, AI863306, AI804393, |
| | | | | | AI432712, AI587218, AI218649, |
| | | | | | AI339726, AA780366, AI825578, |
| | | | | | H70209, AA470738, AI669249, H70546, |
| | | | | | AI611674, AI792038, R08140, T82124, |
| | | | | | AI791228, AI820643, AA847657, |
| | | | | | AI342131, AI342141, AA989292, |
| | | | | | AI631664, AI697858, AI697880, |
| | | | | | AI278251, and R84867. |
| HSSKD85 | 36 | 908141 | 1-1136 | 15-1150 | AW024960, AI479960, AI052585, |
| | | | | | AI139986, AA135576, AW137104, |
| | | | | | AW205456, N30762, AI631818, |
| | | | | | AI187156, AA830014, AI452434, |
| | | | | | AA634216, AW088488, AA398256, |
| | | | | | AI859053, AI088449, AI159823, |
| | | | | | AA564062, AI494095, AA158516, |
| | | | | | AI311717, AA811798, AA226160, |
| | | | | | AI873741, N25872, AA146624, |
| | | | | | AA761003, AA190958, AI066392, |
| | | | | | AA535733, AI278434, W92242, |
| | | | | | AA225625, N40580, H94758, AI382438, |
| | | | | | AI796467, W92243, R59937, H94384, |
| | | | | | H94363, AI969940, W70120, AW338143, |
| | | | | | W99328, AA143555, AA399431, |
| | | | | | AA190865, N45043, AI718153, |
| | | | | | AI245054, AI906964, AI760352, |
| | | | | | AA135514, AA653523, AI708811, |
| | | | | | AA034276, W69970, AA156400, |
| | | | | | M93661, D32210, and U57368. |
| HCRMV17 | 37 | 1180333 | 1-1474 | 15-1488 | AI492198, W44823, W39773, AL044584, |
| | | | | | AA381672, AB002357, and D26077 |
| HFOXL77 | 38 | 1137799 | 1-767 | 15-781 | W22070, AB033063, and AR065869. |
| HBXCZ29 | 39 | 1226989 | 1-2442 | 15-2456 | AA298841, Z28624, N95698, N98646, |
| | | | | | N98639, and N76151. |
| HRDBJ38 | 40 | 1227194 | 1-1774 | 15-1788 | AI828007, AI075340, AI338572, |
| | | | | | AI683815, AI338134, H29723, AI221309, |
| | | | | | AI348269, AA774440, AW072554, |
| | | | | | R72306, H29724, R82932, AA447906, |
| | | | | | R83115, AA661652, AI932413, R72359, |
| | | | | | C03492, AA936172, AA451938, C15076, |
| | | | | | D59467, D80164, D59502, D51423, |
| | | | | | D81026, C14389, D59275, D59787, |
| | | | | | D80038, D80195, D59610, D80193, |
| | | | | | D81030, D80227, D58283, D59859, |
| | | | | | D80022, D80166, D80253, D59619, |
| | | | | | D80210, D51799, D80391, D80240, |
| | | | | | D80043, D80269, D80241, D80212, |
| | | | | | D50979, D80196, D80188, D80219, |
| | | | | | D57483, D59927, C14331, D80366, |
| | | | | | D59889, D50995, AW387762, D80251, |
| | | | | | D80024, D52291, D51022, D80378, |
| | | | | | AW177440, AA305409, D80045, |
| | | | | | C14429, AA305578, AW378532, T03269, |
| | | | | | D80522, AW178893, D51060, C75259, |
| | | | | | C14014, AW179328, AA514188, |
| | | | | | D80248, D51250, T11417, AW369651, |
| | | | | | AW352158, D80134, AW178762, |
| | | | | | D58253, AW178775, AW177501, |
| | | | | | AW177511, AA514186, D80133, |
| | | | | | C14077, AW176467, AW360811, |
| | | | | | AW352117, C05695, F13647, |
| | | | | | AW377671, AW375405, D80268, |
| | | | | | AW378540, AI910186, AI557751, |
| | | | | | AW366296, AW360844, C14407, |
| | | | | | AW360817, AW375406, AW378534, |
| | | | | | AW179332, AW377672, AW179023, |
| | | | | | AW178905, D80302, D80132, D51103, |
| | | | | | AI905856, C06015, AW352170, |
| | | | | | AW177505, AW352171, D80439, |
| | | | | | AW377676, AW178906, AW177731, |
| | | | | | AW178907, D80014, AW179019, |
| | | | | | AW179024, D59373, D80247, |
| | | | | | AW360841, AW179020, AW178909, |
| | | | | | AW177456, AW179329, AW378528, |
| | | | | | AW178980, Z21582, AW177733, |
| | | | | | AW178908, AW178754, AW179018, |
| | | | | | D51213, AW360834, D80258, D59503, |
| | | | | | AW352174, AW179004, AW179012, |
| | | | | | AW178914, AW378525, D51097, |
| | | | | | D80157, AW177722, AW177728, |
| | | | | | D81111, AA285331, C14227, |
| | | | | | AW179009, D51759, AW367967, |
| | | | | | AW178774, AW178911, AW378543, |
| | | | | | AW352163, D59627, T02974, D45260, |
| | | | | | AW178983, A1557774, AW352120, |
| | | | | | AW178781, T48593, D58246, AA809122, |
| | | | | | AW177723, D59653, D58101, H67854, |
| | | | | | C14975, AW177508, AI535850, |
| | | | | | AW367950, H67866, C03092, |
| | | | | | AW378533, D80168, AI525923, D80064, |
| | | | | | AW178986, T03116, AF085878, A62298, |
| | | | | | A84916, AJ132110, A62300, AR018138, |
| | | | | | AB028859, AF058696, A25909, |
| | | | | | AR008278, X67155, D26022, Y17188, |
| | | | | | A67220, D89785, A78862, D34614, |
| | | | | | D88547, I82448, Y12724, X82626, |
| | | | | | AR025207, A82595, AB002449, |
| | | | | | AR060385, A94995, AR008443, |
| | | | | | AB012117, AR016808, AR066482, |
| | | | | | X68127, A30438, I50126, I50132, I50128, |
| | | | | | I50133, A85396, A44171, AR066488, |
| | | | | | AR016514, A85477, AR060138, A45456, |
| | | | | | I19525, A26615, AR052274, A86792, |
| | | | | | X93549, A43192, A43190, Y09669, |
| | | | | | AR038669, U87250, Y17187, AR066487, |
| | | | | | AR054175, I14842, AR066490, D88507, |
| | | | | | X64588, AR008277, AR008281, I18367, |
| | | | | | D50010, I79511, A63261, AR008408, |
| | | | | | AR062872, A70867, AR016691, |
| | | | | | AR016690, U46128, D13509, AF135125, |
| | | | | | AR060133, U79457, A64136, A68321, |
| | | | | | AB023656, AF123263, AB033111, |
| | | | | | AR032065, X93535, and AR008382. |
| HCOKA10 | 41 | 907080 | 1-759 | 15-773 | AW327294, F31091, AA528669, |
| | | | | | AA505384, AW328419, AW328418, |
| | | | | | AW419243, AA187998, AA640483, |
| | | | | | F31092, AA420717, AI348852, W81029, |
| | | | | | AA482925, AI879569, AA946918, |
| | | | | | AA314600, AA825612, AA808869, |
| | | | | | W45176, AA316648, AA651658, |
| | | | | | AI735276, W52650, AA534263, |
| | | | | | AA314556, AA417254, AI342431, |
| | | | | | AA622408, AA181138, AA506547, |
| | | | | | W68664, AA635583, AA991834, |
| | | | | | AA187537, AA128015, W96306, |
| | | | | | AA505394, AA186606, AA524595, |
| | | | | | AI336250, AA862109, N90275, |
| | | | | | AA187128, AA737195, AA659642, |
| | | | | | AI879186, AA307087, AA991775, |
| | | | | | AA579430, AA643777, F32467, |
| | | | | | AA654628, F33074, AW082068, |
| | | | | | AA484856, AA653801, AA469168, |
| | | | | | AA420763, AI090379, AA421550, |
| | | | | | AA469285, AA775298, N78682, |
| | | | | | AA225075, AA314013, AI735264, |
| | | | | | C15999, AI004885, AI185905, |
| | | | | | AA155975, AA541346, AW006688, |
| | | | | | AA838376, AA507479, AA315116, |
| | | | | | AA147815, AW440264, F25989, |
| | | | | | AA528681, AI718105, AI185191, |
| | | | | | AI830011, AI074436, AI193986, |
| | | | | | AA483568, AA844667, F30622, |
| | | | | | AI598223, AI431978, AA157591, |
| | | | | | AW340929, AI718714, AA147943, |
| | | | | | AA960763, AI140252, AI131544, |
| | | | | | AA659113, C14408, F28423, AI193088, |
| | | | | | AI749326, C14506, AA181285, C14409, |
| | | | | | AI302400, AI570974, AI936281, |
| | | | | | AA229654, AA229788, AA302294, |
| | | | | | AI982992, F31208, AA935155, |
| | | | | | AI193847, H46476, AA838474, F20187, |
| | | | | | AA492052, AI609502, AI709111, |
| | | | | | AA469365, F32353, AA608589, |
| | | | | | AA643956, AA961534, AA226596, |
| | | | | | AI973135, AA128058, AA829205, |
| | | | | | AA501744, AW276969, AI721218, |
| | | | | | AI924736, AA147740, AA579354, |
| | | | | | AA995673, AI253661, AA022517, |
| | | | | | D52050, F27939, AA744974, D52103, |
| | | | | | C14325, F26226, C14332, AI440106, |
| | | | | | C14532, C14505, AA229085, AI205658, |
| | | | | | W38596, AA613651, H89629, |
| | | | | | AA029290, AA975314, C14296, F33568, |
| | | | | | W90547, F30424, AI748823, F25844, |
| | | | | | AA932252, AA229038, AA569478, |
| | | | | | AI300774, AA483111, AA631847, |
| | | | | | AI523368, AA363475, W81066, |
| | | | | | AI094402, AI440377, AA131139, |
| | | | | | F29490, AA554888, C14458, AW262694, |
| | | | | | N57388, AA658868, AA320538, P30326, |
| | | | | | F30077, AI718951, AA664723, W45081, |
| | | | | | C14216, AI151472, AA601532, C14355, |
| | | | | | AI032761, AI720880, F19339, |
| | | | | | AA594497, AA654880, AI510833, |
| | | | | | AA320738, AI718725, AA181139, |
| | | | | | T48033, AA082246, AA318164, |
| | | | | | AA023034, AI379782, AA501349, |
| | | | | | AI709200, AW020881, F26870, |
| | | | | | AI919316, AA985525, AA318175, |
| | | | | | AA375674, H47015, AI709292, |
| | | | | | AI580440, T78704, AA226675, |
| | | | | | AA595613, AA230292, AA528661, |
| | | | | | AA101676, AA188186, AA372741, |
| | | | | | AA320632, F34274, D51607, F32629, |
| | | | | | T54178, AI352694, AI720481, F31158, |
| | | | | | AA469169, AA642170, AA230044, |
| | | | | | AA661507, T40904, T57476, AI832316, |
| | | | | | AA373500, T57504, T54087, C14334, |
| | | | | | AA729378, F31962, AW272552, D51810, |
| | | | | | AI675421, N29450, AA679894, |
| | | | | | AA375716, AL021397, L38941, |
| | | | | | AF147334, AF084363, AC003061, |
| | | | | | AC005372, X14401, AC004796, |
| | | | | | AC006597, AL049714, AF109472, |
| | | | | | A75356, S76596, AB007181, Y11587, |
| | | | | | I48979, AF113690, AF118070, S78214, |
| | | | | | AF113691, AL133640, AF090934, |
| | | | | | AF090900, AF106862, AL050393, |
| | | | | | L31396, L31397, AF090943, AF078844, |
| | | | | | AL122093, AL117457, AF113694, |
| | | | | | AL117460, U42766, I89947, AL049938, |
| | | | | | AL050146, AF113013, AF118064, |
| | | | | | I89931, AL133016, AF125949, |
| | | | | | AL110196, AL110221, A93016, |
| | | | | | AL050108, AF090901, AL133606, |
| | | | | | AL122050, AF104032, AL050116, |
| | | | | | AF090896, AJ242859, AF090903, |
| | | | | | AF113676, S68736, AL049452, |
| | | | | | AB019565, AL137527, AL080060, |
| | | | | | AF113019, AF113677, A08913, |
| | | | | | AR059958, A08916, AF113689, X84990, |
| | | | | | AL050149, AF113699, AL049314, |
| | | | | | AL133075, AL049466, AL080124, |
| | | | | | AL133557, AL050277, AL080137, |
| | | | | | AF017152, AL096744, AF158248, |
| | | | | | I48978, E03348, AL133565, AL137557, |
| | | | | | E07361, AL133093, AL133080, |
| | | | | | AL137283, Y16645, AL122121, |
| | | | | | AF111851, AF017437, AL137459, |
| | | | | | Y11254, AJ000937, X63574, AL122123, |
| | | | | | X82434, AR011880, AF097996, U91329, |
| | | | | | AL050138, AF091084, AF125948, |
| | | | | | AF146568, AL137550, AL117394, |
| | | | | | AL110225, AF079765, A65341, |
| | | | | | AL117585, AL049430, AL117435, |
| | | | | | I49625, AF177401, AL133560, |
| | | | | | AL117583, A08912, AL049300, U00763, |
| | | | | | E02349, AL049464, A08910, E07108, |
| | | | | | AJ238278, X72889, AL049382, I33392, |
| | | | | | AL122098, A03736, AF067728, X70685, |
| | | | | | AL050024, A08909, A77033, A77035, |
| | | | | | AF183393, Z82022, I03321, A58524, |
| | | | | | A58523, AL122110, AL137271, |
| | | | | | AF118094, AC007390, AI2297, S61953, |
| | | | | | U35846, AL137648, AL137463, |
| | | | | | AF095901, U72620, AL049283, X96540, |
| | | | | | AC004093, AF061943, AF026816, |
| | | | | | AL133113, AL035458, AL137538, |
| | | | | | AL080127, X93495, U80742, X65873, |
| | | | | | E05822, AF087943, X98834, AF109906, |
| | | | | | AC006336, I42402, AL137521, Z72491, |
| | | | | | AL110197, I09360, U67958, AL080159, |
| | | | | | Y09972, Y07905, E08263, E08264, |
| | | | | | AL122049, AL133072, AJ012755, |
| | | | | | AF026124, AL137560, I26207, E15569, |
| | | | | | AC006112, AL050172, I17767, |
| | | | | | AF003737, AC006840, AF210052, |
| | | | | | AL137294, AF119337, AL133568, |
| | | | | | AF091512, AF162270, A93350, |
| | | | | | AC004878, AL110280, AF111112, |
| | | | | | AF057300, AF008439, AF057299, |
| | | | | | M30514, AC004690, AC002467, |
| | | | | | AL137526, A08911, AC004200, |
| | | | | | AR013797, L13297, I00734, L30117, |
| | | | | | E00617, E00717, E00778, AL133077, |
| | | | | | AL137523, AC004987, AF185576, |
| | | | | | AL137556, AR000496, U39656, I66342, |
| | | | | | AL133014, AF000145, AF061795, |
| | | | | | A07647, AF151685, AL133104, E04233, |
| | | | | | AL133098, AC006371, AF177767, |
| | | | | | AR038969, T39948, T48092, T53717, |
| | | | | | T54310, T58614, T58631, T58665, |
| | | | | | T58680, T59454, T59609, T60693, |
| | | | | | T60724, T61517, T40270, H89483, |
| | | | | | N31100, W15188, W79553, W90546, |
| | | | | | AA101675, AA177148, AA230059, |
| | | | | | AA230201, AA482934, AA501580, |
| | | | | | AA514483, AA523478, AA527911, |
| | | | | | AA533427, AA541546, AA548914, |
| | | | | | F15751, AA579103, AA654916, |
| | | | | | AA659893, AA662847, AA729739, |
| | | | | | AA746663, AA746696, AA746820, |
| | | | | | AA917622, AA953954, AA962129, |
| | | | | | N83299, N84751, N85724, N85940, |
| | | | | | C14425, C14487, C14529, AA090952, |
| | | | | | AA089892, C15916, AA094133, |
| | | | | | AA095139, AA652445, D11811, D11899, |
| | | | | | Z19815, F22033, AA722737, AA775136, |
| | | | | | T25716, AI302923, AI370276, AI474980, |
| | | | | | AI567460, AI198759, and AI292268. |
| HKGDI91 | 42 | 1137801 | 1-1156 | 15-1170 | AI952995, AW071872, AW297176, |
| | | | | | AW131657, AI871511, AI568544, |
| | | | | | AI341664, AA833875, AA833896, |
| | | | | | AW276827, AI884982, AL046409, |
| | | | | | AI362442, AI887085, AI356440, |
| | | | | | AI687343, AI133083, R64640, AI613280, |
| | | | | | F36273, AI627917, AW073510, |
| | | | | | AI688846, AI431303, AI612142, |
| | | | | | AW338086, AI521525, AI375710, |
| | | | | | AI214075, W60522, AI921765, |
| | | | | | AW193432, AI284640, AW020150, |
| | | | | | AI281881, H88666, AW238278, |
| | | | | | AW341903, AW166611, AI433131, |
| | | | | | AI246796, AI345654, AI610941, |
| | | | | | AI270117, AI471481, AI537368, |
| | | | | | AI926102, AA669840, AI224583, |
| | | | | | AI866970, AW406162, AA601336, |
| | | | | | AW438643, AA483223, AI289067, |
| | | | | | N71033, AL049569, AC007546, |
| | | | | | AC002351, AC006064, Z97989, |
| | | | | | AL020995, AL049631, AF067844, |
| | | | | | AC005895, AL031848, AF196779, |
| | | | | | AC006449, AL049795, AC006312, |
| | | | | | AC006057, AL035455, AF165926, |
| | | | | | AC004408, AC005879, AC006576, |
| | | | | | AL031985, AF207550, AL024494, |
| | | | | | Z97196, AL035422, AP000509, |
| | | | | | AC002036, AC004522, Z98200, |
| | | | | | AC007227, AC004655, AC008039, |
| | | | | | AC005799, AL121652, D84394, |
| | | | | | AC004770, AL096712, AL022323, |
| | | | | | AL009181, Z97832, AC005377, |
| | | | | | AP000692, AC004841, AC004526, |
| | | | | | AL050312, AL022326, AL023553, |
| | | | | | AC003030, AL135744, AP000356, |
| | | | | | AC005952, AL031432, AC005666, |
| | | | | | AC004663, AC003101, AC005746, |
| | | | | | Z83844, AL136295, AC005520, |
| | | | | | AC005701, AC004257, Z98742, |
| | | | | | AL096701, AF196969, AC002402, |
| | | | | | AP000350, AF107885, AC004883, |
| | | | | | AC004460, AL022336, AC020663, |
| | | | | | AL121653, AC007687, AC005488, |
| | | | | | AC005846, U91327, AC004999, |
| | | | | | AC004228, AC006539, AP000045, |
| | | | | | AP000113, AL109628, AC007917, |
| | | | | | AC018633, AC004976, AL008730, |
| | | | | | AC002303, AC006965, AL049829, |
| | | | | | AC002365, AP001053, AC004491, |
| | | | | | AL049780, AL035685, AL033518, |
| | | | | | AC005668, AC002316, AL034420, |
| | | | | | AF111167, AC006211, U80017, |
| | | | | | AP000555, Z97054, AL049709, |
| | | | | | AP000553, AC003007, AC007421, |
| | | | | | L78833, AC007436, AL049759, |
| | | | | | AC006059, AC004622, AC003029, |
| | | | | | AC006960, AL034423, AF001549, |
| | | | | | AL035410, AC005632, AP000098, |
| | | | | | AC012627, AL031229, AL021393, |
| | | | | | AL096861, AC005484, AC000378, |
| | | | | | Z82178, AC005200, AD000091, U95740, |
| | | | | | AF053356, AC000134, AL049843, |
| | | | | | AC005740, AC006236, AC002039, |
| | | | | | AP000855, AC005778, AC002468, |
| | | | | | AL031659, AC009516, AC005695, |
| | | | | | AC004531, AC006213, AC004234, |
| | | | | | AL109801, AC006581, AL109758, |
| | | | | | AC005237, AC005519, AC005859, |
| | | | | | AC003954, AC002425, AC006241, |
| | | | | | AC004838, AF165147, AC009509, |
| | | | | | AL034429, AC004752, AL133245, |
| | | | | | AL022334, AC005771, AC011594, |
| | | | | | AC003112, AC005015, AL022328, |
| | | | | | AC005180, Z93017, Z54334, AL021367, |
| | | | | | AL031777, AL080243, M89651, |
| | | | | | AL109623, AC008249, AC005914, |
| | | | | | AC006285, AL031311, AC002314, |
| | | | | | AP000065, AC002470, U91326, |
| | | | | | AC005756, AC004778, AC004000, |
| | | | | | AL008718, AC003002, U95090, |
| | | | | | AC005089, AC007731, AC005189, |
| | | | | | U36341, AL132826, AC002045, |
| | | | | | AC005332, AC005500, AL034548, |
| | | | | | L78810, Z84487, U62317, AL132712, |
| | | | | | AC004525, AP000010, AL020993, |
| | | | | | AL096767, Z95114, AC005393, |
| | | | | | AB020868, AC005911, AC005412, |
| | | | | | AL021977, U85195, AL050333, |
| | | | | | AL035089, AB020864, AL109952, |
| | | | | | AL034582, AC007228, AF045555, |
| | | | | | AL079342, AL022162, AC004967, |
| | | | | | AC006538, AC006077, AC019014, |
| | | | | | AC004966, AC009501, AP000557, |
| | | | | | AC007191, AC005255, AC004812, |
| | | | | | AC006512, Z99716, AC007564, and |
| | | | | | AC005005. |
| HMKBA52 | 43 | 1151501 | 1-680 | 15-694 | AA523403, AI829899, AA523385, |
| | | | | | AA994860, AA579648, AI632950, |
| | | | | | AI973009, AI738914, AA531533, |
| | | | | | AW170108, AA576762, AI632938, |
| | | | | | AI458825, N92795, AI440250, W19381, |
| | | | | | H00155, AW054942, AI524119, |
| | | | | | AA315083, AI864546, AI573013, |
| | | | | | AA743192, AA773196, AA604879, |
| | | | | | A1827077, AA286723, AA651826, |
| | | | | | AA994191, H02868, AW028760, |
| | | | | | W74308, AA436860, AI359895, |
| | | | | | AA931153, AA579577, AI183273, |
| | | | | | AA282509, R22801, AA974927, |
| | | | | | AA347744, AA573307, AW275394, |
| | | | | | R15727, R16093, AI205801, T69750, |
| | | | | | AI829984, AW050606, AA983885, |
| | | | | | AA442617, AA588021, AW243981, |
| | | | | | AA287630, AW025818, AA953158, |
| | | | | | AI867829, AI475364, AA622678, |
| | | | | | AI698992, AW072220, H63981, |
| | | | | | AA887706, AI700883, H87783, H24777, |
| | | | | | AW407293, R24453, H42312, |
| | | | | | AW194872, H24824, AI651812, W79242, |
| | | | | | R72570, H00193, H22337, D31144, |
| | | | | | H87401, H22336, AW408241, |
| | | | | | AA340196, H63712, R21183, AA907236, |
| | | | | | AA353637, AA515743, AW405893, |
| | | | | | H87836, R85129, D30967, AW381930, |
| | | | | | H03765, C02134, AA347745, AA907900, |
| | | | | | AI758547, AA335843, AA342936, |
| | | | | | AI370043, AA327826, AA631714, |
| | | | | | AI146804, R24452, AA627075, |
| | | | | | AI000057, AI460079, AI479807, |
| | | | | | AA804344, AA687118, AA827186, |
| | | | | | AA343096, AI359396, and AA528184. |
| HLCMP75 | 44 | 1203728 | 1-1551 | 15-1565 | AA595199, AA430329, AI339553, |
| | | | | | AI041943, AI284951, AA730621, |
| | | | | | AI652283, AA747653, AI087248, |
| | | | | | AI290327, H12557, AI961855, AI952525, |
| | | | | | AA853085, R55547, AW166405, |
| | | | | | AI081192, T55383, H19258, R55548, |
| | | | | | AI081393, T55811, H26634, H28600, |
| | | | | | AI367028, AI968594, AA430355, |
| | | | | | AI695272, AI468799, AI864807, H00825, |
| | | | | | H27260, R23780, F22336, AI783755, |
| | | | | | H26693, H12800, and AW361580. |
| HWHQR25 | 45 | 1126358 | 1-710 | 15-724 | |
| HLKAB61 | 46 | 1183217 | 1-519 | 15-533 | AW024960, AI479960, AI052585, |
| | | | | | AW205456, AA830014, AA398256, |
| | | | | | AW137104, AI859053, AI873741, |
| | | | | | AI796467, AA225625, AI159823, |
| | | | | | AA811798, AI718153, N25872, |
| | | | | | AI969940, AI382438, AI311717, |
| | | | | | AW088488, AI187156, AI278434, |
| | | | | | AI088449, W92243, AA761003, |
| | | | | | AI631818, AA146624, AI494095, |
| | | | | | AI452434, AI066392, AI245054, |
| | | | | | AA535733, AA190865, R59937, |
| | | | | | AA158516, N30762, AA634216, |
| | | | | | AA564062, AI139986, AA135576, |
| | | | | | W70120, W99328, AA399431, |
| | | | | | AA226160, N45043, AA143555, |
| | | | | | AI906964, AA190958, AA034276, |
| | | | | | AI708811, W69970, N40580, H94758, |
| | | | | | AW338143, and M93661. |
| HEGAZ61 | 47 | 1226372 | 1-2397 | 15-2411 | AL046428, AI208246, AA724983, |
| | | | | | AI221180, AI689614, AA514684, |
| | | | | | AI434656, AI583578, AW088944, |
| | | | | | AL110306, AI929108, AW161098, |
| | | | | | AI570966, AW262042, AI925463, |
| | | | | | AI687568, AW148478, AI802240, |
| | | | | | AI365256, AI760991, AW265004, |
| | | | | | AW074702, AW089932, AI689470, |
| | | | | | AI348777, AW131112, AI699011, |
| | | | | | AI272973, AW089006, AI824497, |
| | | | | | AW081343, AI953765, AI335426, |
| | | | | | AW088899, AW074605, AI537617, |
| | | | | | AW188438, AW130849, AI432570, |
| | | | | | AW085786, AL046463, AA455772, |
| | | | | | AI621341, AI249946, AI591407, |
| | | | | | AI277008, AI539153, AI659795, |
| | | | | | AI419650, AI457490, AI524179, |
| | | | | | AI865297, AI419440, AI434242, |
| | | | | | AI866608, AI446124, AA830821, |
| | | | | | AI633419, AI921746, AI648502, |
| | | | | | AI500514, AI472536, AW028442, |
| | | | | | AW149069, AI873704, AW074374, |
| | | | | | AI266719, AI537190, AA999906, |
| | | | | | AW149876, AI873638, AI886055, |
| | | | | | AW411008, AW088131, AI631977, |
| | | | | | AI274500, AI801602, AI698437, |
| | | | | | AI677797, AI932739, AI866111, |
| | | | | | AI678762, AL041150, AI567302, |
| | | | | | AI857296, AI185535, AI366922, |
| | | | | | AI254754, AI141288, AW083149, |
| | | | | | AI250627, AI524724, AI591101, |
| | | | | | AI799234, AL138388, AI004911, |
| | | | | | AW149236, AW084056, AI623799, |
| | | | | | AI499263, AI564290, AI933992, |
| | | | | | AI241792, T66952, AI679095, AI554827, |
| | | | | | AW078729, AI224373, AI267185, |
| | | | | | AI620093, AI285586, AI611743, |
| | | | | | AI679620, AI889818, AW080326, |
| | | | | | AI249877, AW150326, AW083804, |
| | | | | | AI951222, AI282695, AI696626, |
| | | | | | AI589993, AL037582, AL037602, |
| | | | | | AW150826, AW118508, AI955943, |
| | | | | | AI921167, AI811912, AI569440, |
| | | | | | AW026905, AI244380, AI584140, |
| | | | | | AI680498, AI818353, AI805769, |
| | | | | | AI539771, AW079656, AI699154, |
| | | | | | AI270039, AI360195, AI689102, |
| | | | | | AI636719, AI095113, AI452857, |
| | | | | | AW025464, AI358590, AI672861, |
| | | | | | AI828731, AI591228, AI476109, |
| | | | | | AI682891, AI866786, AW020397, |
| | | | | | AI589391, N74355, AI955604, |
| | | | | | AW084772, AI872148, AW190725, |
| | | | | | AI696969, AI680280, AI538980, |
| | | | | | AI537991, AI344911, AW168849, |
| | | | | | AI620287, AI357599, AI624529, |
| | | | | | AI567944, AW149221, AI621171, |
| | | | | | AW263569, AI830187, AI623682, |
| | | | | | AI290203, AL079794, AI089970, |
| | | | | | AI280661, AW152415, AW084097, |
| | | | | | AI537677, AW089327, AI524233, |
| | | | | | AW129230, AI698265, AL135065, |
| | | | | | AI679916, AW167422, AI366549, |
| | | | | | AI669639, AW132001, AI828574, |
| | | | | | AW192461, AI537643, AI570909, |
| | | | | | AI252077, AW073898, AW148303, |
| | | | | | AI345415, AI421087, AI445620, |
| | | | | | AW026633, AI805688, AI379711, |
| | | | | | AA831987, AI480104, AI440238, |
| | | | | | AI678446, AI888621, AI696533, |
| | | | | | AI491904, AW080076, AL079728, |
| | | | | | AI469516, AI471704, AI471429, |
| | | | | | AW243637, AI656270, AW079334, |
| | | | | | AI370812, AI247298, AW078689, |
| | | | | | AI636788, AI571699, AW129616, |
| | | | | | AI277325, AA828310, AW087863, |
| | | | | | AI435268, AI436458, AW082600, |
| | | | | | AI203903, AI784028, AW151847, |
| | | | | | AW087824, AI805638, AI953767, |
| | | | | | AI915295, AI572676, AI696819, |
| | | | | | AL041573, AA916133, AI866082, |
| | | | | | H89138, AW148382, AI952302, |
| | | | | | AI341539, X66139, AF090327, X66140, |
| | | | | | AF013107, I66342, L10353, U72621, |
| | | | | | Y08616, X59414, A30330, I09499, |
| | | | | | A65340, AF119336, AF114170, U92068, |
| | | | | | I30339, I30334, AL050024, I17544, |
| | | | | | M27260, A32826, A30331, AL133016, |
| | | | | | AJ010277, A21101, I89947, A18777, |
| | | | | | AL137480, AF017437, AL137294, |
| | | | | | X72889, A32827, I48978, AF113690, |
| | | | | | AF036941, A86558, AF000145, |
| | | | | | AF065135, U42031, S77771, AL080148, |
| | | | | | AL117648, AF067420, AF158248, |
| | | | | | AF067728, AL133081, X52128, U96683, |
| | | | | | AL050116, AL049460, AF030165, |
| | | | | | X86693, AL133619, AL110222, |
| | | | | | AL137268, U89906, AL122050, |
| | | | | | AF132676, AL117626, AF061836, |
| | | | | | A08913, AL117460, AF094480, |
| | | | | | AL080127, AF044323, AF146568, |
| | | | | | U80742, AL137555, E02221, U75370, |
| | | | | | I89931, AL137554, A08912, AL117629, |
| | | | | | A08910, Z97214, A08911, I49625, |
| | | | | | A08909, AF215669, I33392, X06146, |
| | | | | | X84990, AF090886, S69407, AL050138, |
| | | | | | X62773, AR038854, I32738, A08907, |
| | | | | | AL136884, A08908, AF145233, |
| | | | | | AF107847, M22991, AF047443, I22020, |
| | | | | | U57352, AL080137, U78525, S76508, |
| | | | | | U36585, AF102578, I89934, AL137300, |
| | | | | | AR029580, AL137276, AL133104, |
| | | | | | X99257, X60786, U90884, AL080162, |
| | | | | | X67813, X53587, AF067790, AF012536, |
| | | | | | AL049996, E03348, L13297, AB026995, |
| | | | | | E03349, AF054986, A90844, AL137459, |
| | | | | | AF199027, AL137660, AR068182, |
| | | | | | AL080060, AF089818, AF162782, |
| | | | | | AL122106, AL137547, AL117432, |
| | | | | | D16301, U77594, U49908, AF109155, |
| | | | | | U87620, AJ003118, X98834, I22272, |
| | | | | | AL122110, Y16645, AF118094, A65341, |
| | | | | | X62580, AL049382, X80340, AF159615, |
| | | | | | AL137538, AL122098, AL137256, |
| | | | | | AL137659, AF057300, AF057299, |
| | | | | | AL049347, AB016226, Y16258, Y16257, |
| | | | | | E02756, Y16256, A07588, AF090943, |
| | | | | | AL137557, AL137478, Z72491, |
| | | | | | AF111851, AL050172, AB025103, |
| | | | | | AJ238278, S69510, AL137712, |
| | | | | | AF036268, AL080126, AL133049, |
| | | | | | AF019298, AL133075, AF167995, |
| | | | | | A70386, AL137562, AF087943, |
| | | | | | AL133645, AL122111, E15582, |
| | | | | | AF017152, E01963, AF177401, S68736, |
| | | | | | and AF081571. |
| HPJEQ52 | 48 | 1216564 | 1-2006 | 15-2020 | AI963029, AA737799, AA622208, |
| | | | | | H54262, AI687468, AI819928, |
| | | | | | AW002750, AI863520, AI669204, |
| | | | | | AI910600, AI350437, AW015174, |
| | | | | | AA513377, AW149964, H54263, |
| | | | | | AW338035, AW338021, AA706495, |
| | | | | | AA536040, AI755214, AI754567, |
| | | | | | AA773463, AA515048, AA410788, |
| | | | | | AI754105, AW075729, AW272294, |
| | | | | | AI923052, AA643770, A1755057, |
| | | | | | AI573198, AA630854, AA904211, |
| | | | | | AI923451, AA225406, AI635028, |
| | | | | | AI160786, AA535216, AI362442, |
| | | | | | AA115863, T74524, AI446259, |
| | | | | | AA568314, AW023111, AL119247, |
| | | | | | AA828637, AA228778, AI890794, |
| | | | | | AI249688, AW190505, AI431513, |
| | | | | | AW419389, AW245354, AA610433, |
| | | | | | R93919, AA524616, AW265688, |
| | | | | | W96522, AI038304, AA714110, |
| | | | | | AA297666, AL079734, AI923458, |
| | | | | | N58301, F23264, AW131356, AI192440, |
| | | | | | AA084609, AI569100, AA515939, |
| | | | | | AI570943, AI310464, AL044471, |
| | | | | | AA664604, AA779783, AL135377, |
| | | | | | AW192599, AA315361, AA713705, |
| | | | | | AI609972, AI583291, AA176604, |
| | | | | | AA947369, AA503298, AI870453, |
| | | | | | AW188427, AI884383, AA714288, |
| | | | | | AA610233, AI890971, AA262752, |
| | | | | | AA501461, AC005899, Z82206, |
| | | | | | AL031295, AC007227, AL139054, |
| | | | | | AP000088, AL049776, AC005887, |
| | | | | | AL109984, Z99128, AC004598, |
| | | | | | AF196779, AC003101, AC005823, |
| | | | | | AC006111, AL035407, AL031311, |
| | | | | | AL136295, AC002316, U47924, |
| | | | | | AC003046, AL022476, AC005295, |
| | | | | | AL022238, AC006026, AC005231, |
| | | | | | AC005736, AC004805, Z95114, |
| | | | | | AC007308, AP000503, AC002314, |
| | | | | | AC002400, AC006480, AC003037, |
| | | | | | AC005696, AC007358, AC010205, |
| | | | | | AP000338, AC005751, AL049869, |
| | | | | | AC005239, AP000216, AC003047, |
| | | | | | AC005778, AC005667, AL096766, |
| | | | | | AL020993, AC002300, AC007298, |
| | | | | | AC004526, AC005330, AC004520, |
| | | | | | AC007052, AL049779, AC006011, |
| | | | | | AC002472, Z98946, AL031589, |
| | | | | | AC005484, AC004686, AC005911, |
| | | | | | AC004797, AL096791, AC005102, |
| | | | | | AC004106, AC004813, AC004466, |
| | | | | | AP000141, AC009516, AL049694, |
| | | | | | Z98036, AL109827, AC011625, |
| | | | | | AP000553, AC002404, AC005274, |
| | | | | | AL033397, AL117694, AC005015, |
| | | | | | AL022316, AC005962, AC004832, |
| | | | | | AC005200, AC003071, Z97054, |
| | | | | | AP000104, AC013417, AC016025, |
| | | | | | AC005678, AL021154, AL023284, |
| | | | | | Z98745, L78833, AL031427, AL133448, |
| | | | | | AL031297, AC006344, AL033521, |
| | | | | | AL031587, AC005800, AC006211, |
| | | | | | AC002544, AC006530, AC004583, |
| | | | | | AC005821, AL022165, AL031659, |
| | | | | | AL035587, AC004876, AC007435, |
| | | | | | AL096774, AL031846, U80017, |
| | | | | | AC004817, AC007536, AL035443, |
| | | | | | AF001548, AC05837, AC004242, |
| | | | | | AC004890, AC003969, AL132992, |
| | | | | | AP000152, AC004596, AP000030, |
| | | | | | AL133163, AL022328, AC005037, |
| | | | | | AC006312, AC004031, AC002126, |
| | | | | | AC005670, AL020997, Z98304, |
| | | | | | AC005332, U95739, U95742, AF207550, |
| | | | | | AC005632, AC004883, AC002070, |
| | | | | | AL021397, AC004659, AF017104, |
| | | | | | AC008009, AL133244, D87675, |
| | | | | | AC002477, AC010582, AC003007, |
| | | | | | AL022320, AL034429, AL031681, |
| | | | | | U91321, AC005907, AC006116, |
| | | | | | AC007542, AL031670, AL121652, |
| | | | | | AC006487, AC007731, Z98884, |
| | | | | | AC002395, AC002553, AC005500, |
| | | | | | L78810, Z68870, AP000302, Z83844, |
| | | | | | AL023807, AC005520, AC004858, |
| | | | | | AC007225, AC007546, AC005620, |
| | | | | | AC006205, AC002310, AL031447, |
| | | | | | AC005756, AC002558, AL031984, |
| | | | | | AL021155, AC000353, AL035455, |
| | | | | | AC006241, AL049856, AC004168, |
| | | | | | AC007421, AC004383, AL049636, |
| | | | | | AL049552, AF196972, AL034379, |
| | | | | | AC004757, AL035405, AC006013, |
| | | | | | AC006449, AC004253, AC004148, |
| | | | | | AF107885, AL021393, AP000045, |
| | | | | | AP000113, AC007193, AC004821, |
| | | | | | AC006023, AC005914, AC003080, |
| | | | | | AC002504, AL022725, AC004559, |
| | | | | | AF050154, AC005701, AC005006, |
| | | | | | AC004079, AC002059, AC007845, |
| | | | | | AC007199, AL035400, AF196969, |
| | | | | | U62292, AL031281, AC007216, |
| | | | | | AP000269, AL050318, Z83838, |
| | | | | | AC007664, AL008627, AC004645, |
| | | | | | AL049653, U91318, AL022313, |
| | | | | | AL031767, AC005871, AC007687, |
| | | | | | AF134726, Z86064, AC006948, |
| | | | | | AC007666, AC004885, AL049712, |
| | | | | | AC005291, AC005215, AL049569, |
| | | | | | AC006146, Z98200, AC004655, |
| | | | | | AP000239, and AC000159. |
| HFIZB56 | 49 | 1137798 | 1-1878 | 15-1892 | AW410354, AI358384, AA584489, |
| | | | | | AI040051, AA644090, AI696793, |
| | | | | | AA720732, AA169245, AW021583, |
| | | | | | AI587583, AA630672, AI587565, |
| | | | | | AA574442, AA491284, AI282479, |
| | | | | | AI623764, AI254779, AW020094, |
| | | | | | AA993818, AW302909, AI796627, |
| | | | | | AW021399, AI205181, AI754037, |
| | | | | | AI732120, AI491867, AA680243, |
| | | | | | AA610509, AA634786, AI580652, |
| | | | | | Z98200, AL034343, AF001548, |
| | | | | | AC008372, AC005765, AL021154, |
| | | | | | AP000261, AC006141, AC005086, |
| | | | | | AC007688, AC005593, Z85986, |
| | | | | | AP000035, AP000100, AC004690, |
| | | | | | AL035090, AC006965, AC008115, |
| | | | | | AP000567, AC004935, AC016830, |
| | | | | | AL033523, AC009501, AL133321, |
| | | | | | AC003101, AL035683, AL078634, |
| | | | | | AC016027, AL021877, AC003037, |
| | | | | | AL132777, AL096791, AL109657, |
| | | | | | AL035079, AC004134, AL035410, |
| | | | | | AL035414, Z74739, AC004460, |
| | | | | | AC003029, AL023494, AC004072, |
| | | | | | AC012627, AE000662, AC007541, |
| | | | | | AL109798, M94081, Z81365, AC004098, |
| | | | | | AL136295, AL080239, AP000356, |
| | | | | | AF091512, AL121655, AL080243, |
| | | | | | L78810, AC005537, AL021395, |
| | | | | | AC004019, U95740, AP000128, |
| | | | | | AP000206, AL034555, AC016025, |
| | | | | | AC004526, AP000245, AC005874, |
| | | | | | AF134471, AL022333, AC006388, |
| | | | | | AL035587, Z86061, AC007766, U40455, |
| | | | | | AC003664, AL050309, AC006285, |
| | | | | | AL023284, AC007283, AC000052, |
| | | | | | AC007536, AL031003, AC005529, |
| | | | | | AC010168, AC007919, AC007666, |
| | | | | | AL021546, AC005015, AC006019, |
| | | | | | AL049757, AC006023, AC004232, |
| | | | | | AC005323, AJ010598, AL022396, |
| | | | | | AC004531, AC006511, AC005046, |
| | | | | | AC006254, AJ003147, AL035608, |
| | | | | | AL023879, Z97055, AC003046, |
| | | | | | AC002564, AP000555, AC006045, |
| | | | | | AC004841, AC006076, AL109628, |
| | | | | | AC004386, AC007050, AC005081, |
| | | | | | AL096794, AC009479, AC005231, |
| | | | | | AC002470, AL050337, AC005856, |
| | | | | | Z82208, AL049837, AC006468, Z97632, |
| | | | | | AC006450, AC000115, AC006984, |
| | | | | | AC006312, AF064861, AC005666, |
| | | | | | AC004408, AL121767, AC004099, |
| | | | | | AP000211, AP000133, D87675, |
| | | | | | AC004972, AC005330, AF001549, |
| | | | | | AC004039, AP001037, AC008101, |
| | | | | | AF036405, AP000359, AL080317, |
| | | | | | AC005484, AL021394, AC006958, |
| | | | | | AC002418, AL121652, AL135744, |
| | | | | | AC007388, AL032821, AL031662, |
| | | | | | AL021391, AJ009610, AL109759, |
| | | | | | AP000355, AL035415, AC004087, |
| | | | | | AL031577, AC003684, AL078593, |
| | | | | | Z97876, AC005480, AL049575, |
| | | | | | AC004804, Z95704, AC008067, |
| | | | | | AL031575, AC004884, AC005192, |
| | | | | | AF067844, AL050348, AL031722, |
| | | | | | AC005399, D84394, Z85987, AP000090, |
| | | | | | AC004859, AP000516, AC005274, |
| | | | | | L78833, AC004916, AL031774, |
| | | | | | AC002310, AP000563, AC007546, |
| | | | | | AC007324, AC018769, AL049643, |
| | | | | | AC003002, AP001060, AC004551, |
| | | | | | AB023049, AL031597, AC006509, |
| | | | | | AL020995, AC002472, AL009181, |
| | | | | | AC007461, AF053356, Z98752, |
| | | | | | AF152363, AC008040, AL031733, |
| | | | | | Z98257, AC004030, AL121838, |
| | | | | | AC003104, AC005023, AC006417, and |
| | | | | | AC000159. |
| HUKEP18 | 50 | 1106982 | 1-838 | 15-852 | AA203189, AI057441, AW139922, |
| | | | | | AA719156, AI653844, AW104223, |
| | | | | | AI208345, AI535660, AI536138, T18597, |
| | | | | | D80045, AI535639, D59751, AI557262, |
| | | | | | C15076, D80164, AI557084, D59467, |
| | | | | | R29657, C14331, D80193, AI526078, |
| | | | | | AI525856, D81026, C14429, AI541365, |
| | | | | | D59787, AA585439, C14389, AI525556, |
| | | | | | AW366296, D80195, D80227, D59502, |
| | | | | | AI557533, AI525316, D50979, D81030, |
| | | | | | D59275, R45895, D80269, AI541205, |
| | | | | | D59927, D80022, D80188, D58283, |
| | | | | | C15406, D80166, D51799, D59859, |
| | | | | | D59619, AI525500, D80210, D80391, |
| | | | | | D80240, D51423, D80253, D80043, |
| | | | | | AI557864, D59610, AA305409, D80212, |
| | | | | | D80038, D80196, D80219, D57483, |
| | | | | | AI905856, D80366, D80378, D59889, |
| | | | | | D50995, AA585098, D52291, D80241, |
| | | | | | D80251, D80024, Z32887, AW177440, |
| | | | | | AI541356, AI557731, Z33559, D51022, |
| | | | | | AI557602, AA305578, AW375405, |
| | | | | | C14407, AW378532, R28735, R29445, |
| | | | | | D51060, D80522, R28967, D53161, |
| | | | | | D57491, T03269, AW178893, C14014, |
| | | | | | R28892, AA585378, AA585325, C75259, |
| | | | | | AA514188, AW179328, R28965, |
| | | | | | AI557155, AA585101, T11417, R29218, |
| | | | | | Z32822, D80248, D54897, D51250, |
| | | | | | AW369651, AI557751, AI541535, |
| | | | | | AA514186, AI541346, AI535686, |
| | | | | | D80134, AW352158, AI540903, D58253, |
| | | | | | AI557809, AI540974, AW375406, |
| | | | | | AW178762, AW178775, AW177501, |
| | | | | | AW177511, D80133, AA969188, |
| | | | | | D80258, AW176467, AW360811, |
| | | | | | D80268, C05695, D61185, M557082, |
| | | | | | AA585356, D60765, F13647, D60844, |
| | | | | | C14077, AW352117, AI546829, |
| | | | | | AW377671, AI557408, AI910186, |
| | | | | | D80132, AW378540, D80302, AI526184, |
| | | | | | AW360844, AW360817, AW378534, |
| | | | | | AI541034, AW179332, AW377672, |
| | | | | | AW179023, AW178905, C06015, |
| | | | | | AI541517, C16294, T48593, AI546875, |
| | | | | | AI546999, AI557241, D80439, |
| | | | | | AW352171, Z21582, D59373, |
| | | | | | AW377676, AW178906, AW352170, |
| | | | | | AW179018, AI541321, AW179024, |
| | | | | | AW177731, AI557734, AI557317, |
| | | | | | D80247, AW178907, AW179019, |
| | | | | | D51213, D81111, AI557787, AW177505, |
| | | | | | AI546971, AW179020, AW360841, |
| | | | | | AW178909, D59627, AW177456, |
| | | | | | AW179329, D51103, AI557727, |
| | | | | | AW178980, AI557852, AW177733, |
| | | | | | AW378528, AW178908, AW178754, |
| | | | | | AI541374, AI526194, AW360834, |
| | | | | | AW352174, AI536070, AI546945, |
| | | | | | D80014, AW179004, AW179012, |
| | | | | | AF100707, A62298, A62300, A82595, |
| | | | | | A84916, AR018138, AR038855, Y17188, |
| | | | | | U87250, AR016808, AR062871, |
| | | | | | AJ132110, H9525, Y17187, AF058696, |
| | | | | | A25909, X67155, D26022, AR008278, |
| | | | | | AB028859, A67220, D89785, A78862, |
| | | | | | D34614, X82626, A94995, AR031365, |
| | | | | | D88547, I82448, Y12724, AB002449, |
| | | | | | AR025207, AF006072, U94592, |
| | | | | | AR016514, AR060385, A43190, A44171, |
| | | | | | AR031358, A30438, Z30183, X68127, |
| | | | | | AR008443, A82593, AB012117, |
| | | | | | AR050070, AR062872, AR038669, |
| | | | | | I50126, I50132, I50128, I50133, A85396, |
| | | | | | AR066482, AR066488, A85477, |
| | | | | | AR060138, A45456, A26615, AR052274, |
| | | | | | A86792, X93549, D50010, Y09669, |
| | | | | | A43192, AR025466, I14842, D13509, |
| | | | | | AR066490, AR066487, I18367, |
| | | | | | AB023656, D88507, AR054175, X76012, |
| | | | | | AR016691, AR016690, U46128, |
| | | | | | AR008277, AR008281, A63261, |
| | | | | | AR008408, A70867, AR017826, X82834, |
| | | | | | I79511, U79457, A64136, A68321, |
| | | | | | AR060133, AF135125, AF213384, |
| | | | | | AF123263, AB033111, AR032065, |
| | | | | | AR060382, X93535, and AR008382. |
| HEEAN63 | 51 | 1105522 | 1-937 | 15-951 | AW003775, AI743601, AI767957, |
| | | | | | AI857666, AI955342, AI659740, |
| | | | | | AI275209, AI146328, AI636177, |
| | | | | | AA419016, AA401928, AI334314, |
| | | | | | AI308977, AI761631, AI559257, |
| | | | | | AI983214, AI827430, AI381402, |
| | | | | | AI243189, AI802466, AA029377, |
| | | | | | AI126418, AA055970, AI539434, |
| | | | | | AF150120, AA757190, AA004885, |
| | | | | | AI217082, AI340984, D59092, AI024042, |
| | | | | | AA227889, AI803295, AA400120, |
| | | | | | AI699068, W23780, N76016, AA554768, |
| | | | | | H65904, R76194, AA488328, AI379343, |
| | | | | | AA856592, AA854678, AI421488, |
| | | | | | AA453740, AW024750, AI220928, |
| | | | | | AI360944, AI699183, AI188608, |
| | | | | | AA677856, AA661758, AI198622, |
| | | | | | N30382, W74209, AA702645, R92572, |
| | | | | | AA865371, W58440, AW403241, |
| | | | | | AI311915, AI057031, AI831576, |
| | | | | | AI302190, AW269519, AA917825, |
| | | | | | AA917814, H00936, AA399357, |
| | | | | | AA481462, R63926, AI022102, H60438, |
| | | | | | AW339258, AA384203, R73102, |
| | | | | | AA775612, W58426, AA470796, |
| | | | | | AA401770, N93900, AA227535, |
| | | | | | AA886338, AA400208, AA602021, |
| | | | | | AA875916, N71158, AA356848, |
| | | | | | AA453821, AA569917, AI400258, |
| | | | | | AW368653, W23264, D20594, |
| | | | | | AA738104, AI039094, AA707182, |
| | | | | | AW363146, AA503879, AI434969, |
| | | | | | AW082532, AI688854, AW088903, |
| | | | | | AI309306, AW251034, AW089844, |
| | | | | | AI823524, AA808175, AI889311, |
| | | | | | AI250282, AW025279, AW198090, |
| | | | | | AW132001, AL041562, AI524654, |
| | | | | | AI802542, AA835947, AI114703, |
| | | | | | AI568293, AI818353, AI815232, |
| | | | | | AI888208, AW105431, AW075936, |
| | | | | | AI624956, AI624971, AI583982, |
| | | | | | AI251216, AI859644, AW129264, |
| | | | | | AI633125, AI273886, AI582932, |
| | | | | | AI245731, AI888523, AI866469, |
| | | | | | AI500714, AI499285, AW050998, |
| | | | | | AI247193, AI539260, AI160713, |
| | | | | | AI565172, AI923989, AI560569, |
| | | | | | AI521005, AI611738, AI954721, |
| | | | | | AI128239, AW239367, AI633330, |
| | | | | | AI926593, AW020592, AI863479, |
| | | | | | AW410858, AW022494, AW020288, |
| | | | | | AI634345, AL038605, AI537677, |
| | | | | | AI356505, AI491842, AW191916, |
| | | | | | AI539771, AI500523, AI933940, |
| | | | | | AI345688, AI590043, AI684279, |
| | | | | | AA830821, AL080011, AI784214, |
| | | | | | AI687168, AI433611, AI628337, |
| | | | | | AI634457, AW264895, AI435253, |
| | | | | | AW075382, AL046942, AW029457, |
| | | | | | AI865289, Z98446, AI859511, |
| | | | | | AW089387, AI564186, AI633009, |
| | | | | | AW087862, AL037454, AI349958, |
| | | | | | AI560806, AW149925, AI583558, |
| | | | | | AW023590, AW044367, AI686817, |
| | | | | | AI801325, AI919600, AI285448, |
| | | | | | AI612913, AI306610, AI918634, |
| | | | | | AI355779, AI500061, AI934011, |
| | | | | | AI926330, AI636588, AW172745, |
| | | | | | AI873638, AI638644, AI609181, |
| | | | | | AI540354, AI521560, AI915207, |
| | | | | | AI927233, AI590785, AI559863, |
| | | | | | AI538817, AI648699, AA837930, |
| | | | | | AW029566, AI568060, AI623941, |
| | | | | | AI339115, AI537516, AI361701, |
| | | | | | AW160363, AI627714, AW073824, |
| | | | | | AI963617, AI658566, AI621341, |
| | | | | | AA651819, AI702073, AI880111, |
| | | | | | AW129916, AI866608, AI340603, |
| | | | | | AI624293, AI632036, AI628325, |
| | | | | | AW023871, AI440239, AL043152, |
| | | | | | AB005809, D29805, AF090901, |
| | | | | | AL137530, AL117460, AF090934, |
| | | | | | AL122100, AL080234, S78214, I89947, |
| | | | | | AF158248, X66871, X70685, AL133640, |
| | | | | | AL137459, A23327, S38729, AL096744, |
| | | | | | AL133049, X80340, AL049276, |
| | | | | | AL137558, AL137533, I48978, A65341, |
| | | | | | AF017790, A58524, A58523, X83544, |
| | | | | | S83440, AL117583, AF183393, |
| | | | | | AF047716, AL122106, AF106657, |
| | | | | | A21103, AL122110, S36676, A08913, |
| | | | | | AL137480, AJ005690, I08319, |
| | | | | | AF061943, AR038854, A86558, Z13966, |
| | | | | | AL050172, AF185614, AF061573, |
| | | | | | AL110280, X98066, AL137281, A08910, |
| | | | | | AL137538, A93350, AF090886, |
| | | | | | AF169154, A08909, AF100931, E03671, |
| | | | | | A18777, Y16645, A08908, Y11587, |
| | | | | | AL117416, A08912, A08911, AR068753, |
| | | | | | A08907, AL137478, A77033, A77035, |
| | | | | | E12806, AF118558, AF124396, |
| | | | | | AR068466, I89931, AF113690, X82434, |
| | | | | | Y10823, U89906, E04233, AR009628, |
| | | | | | AF044323, AF004162, U35846, S76508, |
| | | | | | I49625, AF113019, L13297, AL137271, |
| | | | | | I52013, S82852, E01314, U80742, |
| | | | | | Z35309, AL035458, AF078844, |
| | | | | | AF003737, AL133069, E03348, |
| | | | | | AF126247, AF097996, E03349, |
| | | | | | AL117435, AL137258, AR034821, |
| | | | | | L04504, AF162270, AL122050, I33392, |
| | | | | | AL080110, AF061795, Y14314, A10352, |
| | | | | | AF151685, S77771, AL050155, |
| | | | | | AL050092, X65873, U88966, E12747, |
| | | | | | A57389, A65340, Y18680, A08916, |
| | | | | | AL110221, AF177401, E06743, |
| | | | | | NF032666, X72889, AF115410, |
| | | | | | AF087943, AL049382, AF026124, |
| | | | | | AF026008, L31396, AL050138, L31397, |
| | | | | | AI7115, A18079, AL031346, I89934, |
| | | | | | AR050959, AF104032, AC007458, |
| | | | | | A08456, AF113677, E05822, AL049430, |
| | | | | | L40363, Z82022, X95310, E12580, |
| | | | | | AF111849, AL133075, AF090900, |
| | | | | | AL050108, I32738, AL137716, U76419, |
| | | | | | AF090903, AF113676, AF185576, |
| | | | | | D83032, E02152, AL133084, AL049938, |
| | | | | | AF069506, AF200464, AL122098, |
| | | | | | AF106862, AL133560, Y10655, |
| | | | | | AL117587, E12579, AF126488, |
| | | | | | AL117457, AL050149, AL050116, |
| | | | | | U37359, AL096728, AL137548, |
| | | | | | AB029065, Z97214, AL137479, |
| | | | | | AL096709, AL022170, S61953, I48979, |
| | | | | | AL049324, AL117438, AL050277, |
| | | | | | AL137648, AL133557, AR038969, |
| | | | | | AL137711, Y07905, AJ001388, |
| | | | | | AF055917, U49908, AC004686, |
| | | | | | AC006288, A15345, AF026816, |
| | | | | | AL080124, AL137527, AR016802, |
| | | | | | AF207750, AF161699, A07588, |
| | | | | | AF118094, AB026995, AL122104, |
| | | | | | D44497, AL133088, L30117, E01812, |
| | | | | | J05032, U96683, AF061981, AF195092, |
| | | | | | AL122118, A12297, I03321, AL137267, |
| | | | | | AL137550, AF095901, AR022283, |
| | | | | | AF013214, AL080060, AF067790, |
| | | | | | AL137627, AL137283, AF090943, |
| | | | | | X79812, AL050024, AF038847, |
| | | | | | AJ000937, AF141289, I42402, |
| | | | | | AF118070, AF079763, AF043493, |
| | | | | | I36502, U30290, AF082324, I30339, and |
| | | | | | I30334. |
| HTKAA03 | 52 | 961002 | 1-472 | 15-486 | AC073152, and AC073l52. |
| HTTKB18 | 53 | 963346 | 1-2734 | 15-2748 | AI961227, AI749275, AA403194, |
| | | | | | AI830546, AA401204, AI571463, |
| | | | | | W93852, AW274921, AW073425, |
| | | | | | N30125, AA620397, AI686865, |
| | | | | | AI889248, AA126464, H97568, |
| | | | | | AI185855, AA307735, AL041718, |
| | | | | | AL043648, AA620415, AI590372, |
| | | | | | AA191661, AA633723, AA704011, |
| | | | | | AW161618, AW088454, AI636656, |
| | | | | | AL043647, AW081564, AA406165, |
| | | | | | AI493560, AA526893, AW238853, |
| | | | | | AA635393, AI240253, AA653896, |
| | | | | | AI280716, AA634345, AA744797, |
| | | | | | AW362551, AI351127, AA831120, |
| | | | | | AA976285, AA568447, AI263591, |
| | | | | | AA179982, AA600055, AL048887, |
| | | | | | AI168077, AL041719, W19227, |
| | | | | | AI245315, AI289860, AA191045, |
| | | | | | W05431, AA031816, R14188, AI289422, |
| | | | | | AW151225, N70561, AA702301, |
| | | | | | AA888823, AA082994, N49248, |
| | | | | | AL041076, AA031817, AA251519, |
| | | | | | N30446, W56368, N86136, AI440100, |
| | | | | | AI159966, AI637813, W24380, |
| | | | | | AA435640, T62855, AI459439, |
| | | | | | AI524301, AA714535, W56579, N36319, |
| | | | | | N29982, AI719670, T57671, AW052052, |
| | | | | | N26528, H39930, AL039920, AI708274, |
| | | | | | AW135147, AI523470, R13695, |
| | | | | | AI206212, AA055212, W44915, W31591, |
| | | | | | AA329330, AW004674, W32329, |
| | | | | | H60068, R37791, AA541333, H13593, |
| | | | | | AI557672, AW003494, AW082439, |
| | | | | | H59412, AI272822, N42359, I91235, |
| | | | | | W15519, AA121016, T34649, W24756, |
| | | | | | AA299018, AA350109, R15057, |
| | | | | | AA856703, R86309, T33241, AA083151, |
| | | | | | T36199, N35736, T16413, AA031795, |
| | | | | | R12004, N56051, AI557677, AI557674, |
| | | | | | AI867852, AW007106, H00125, T75430, |
| | | | | | H13224, AA360793, AA852909, N36476, |
| | | | | | AA852908, AA033600, T10105, H50806, |
| | | | | | M557671, AI692468, R86310, AI962017, |
| | | | | | F13217, AI541461, AW160786, F13798, |
| | | | | | AI692469, AA862892, T08054, |
| | | | | | AI474574, N35639, AA864578, |
| | | | | | AA574268, AI557675, AA354850, |
| | | | | | AW408591, T61905, N40972, AA296476, |
| | | | | | AA083694, T57711, W02745, AI796852, |
| | | | | | AA033599, H50704, T86018, AA039348, |
| | | | | | H28444, AI695097, AA813785, T61967, |
| | | | | | N86924, AA149212, AI620975, T62705, |
| | | | | | N40965, AI302924, N83144, R41491, |
| | | | | | AA149211, AI866449, AI557673, |
| | | | | | R58700, AI557676, AI541462, T10104, |
| | | | | | F10817, N93658, AA398872, AA181323, |
| | | | | | AA917616, AI279438, AA830943, |
| | | | | | N47690, D29482, AW189264, |
| | | | | | AA055303, W25420, AA577002, |
| | | | | | AA780273, N84357, AF191298, U47024, |
| | | | | | AC007225, T25740, AI654848, and |
| | | | | | AC012186. |
| HPTZB93 | 54 | 1222478 | 1-1052 | 15-1066 | AW138281, AW206040, AI279486, |
| | | | | | AI817720, AW205987, AW206016, |
| | | | | | AI694554, AA862263, AI860959, |
| | | | | | AI298729, AI299747, AI216051, |
| | | | | | AW340960, AI703067, AI885693, |
| | | | | | AW341220, AI681397, AI802146, |
| | | | | | AI066735, AI279331, AI298540, |
| | | | | | AI912139, AI630777, AI127856, |
| | | | | | AI634502, AI268259, AI796940, |
| | | | | | AI129532, AI299414, AA923300, |
| | | | | | AI692842, AW140104, AW137441, |
| | | | | | AW207254, AI216530, AI914342, |
| | | | | | AI268955, AI459037, AW136174, |
| | | | | | AI299132, AA938376, AI693815, |
| | | | | | AI912208, AI301061, AI002211, |
| | | | | | AI299900, AI298698, AI298009, |
| | | | | | AI702631, AI871768, AI810454, |
| | | | | | AI689870, AW016202, AI458645, |
| | | | | | AI222004, AI689871, AW102711, |
| | | | | | AI702711, AI732920, AI732919, |
| | | | | | AI689859, AI804311, AA995350, |
| | | | | | N68345, AI351290, AA962534, |
| | | | | | AA825171, AA878309, AI476744, |
| | | | | | AA974790, AA934499, AA528135, |
| | | | | | AI702851, AW024083, N94016, |
| | | | | | AI187311, AW003096, AW003320, |
| | | | | | AI670694, AI223259, AW139377, |
| | | | | | AA916697, AI791238, D50979, D59859, |
| | | | | | D80022, D59787, D80166, D80253, |
| | | | | | D80024, D80391, D57483, D59275, |
| | | | | | D80196, D80366, C14429, D51423, |
| | | | | | D81030, D59889, D58283, D59619, |
| | | | | | D80210, D51799, D50995, D80240, |
| | | | | | D80195, D80188, D80212, D80043, |
| | | | | | D80219, D80164, D80227, D59927, |
| | | | | | D80269, D80038, C14331, D80193, |
| | | | | | AA829735, D59467, C15076, D80378, |
| | | | | | AA018899, D59610, D59502, AA885627, |
| | | | | | C75259, D80045, D80241, T03269, |
| | | | | | C14014, AW178893, D51060, AI791237, |
| | | | | | AA910380, C14389, D80134, AA305409, |
| | | | | | D58253, D80268, D51250, D51079, |
| | | | | | F13647, D80949, D80522, AI910186, |
| | | | | | D59695, D81026, D51022, D81111, |
| | | | | | AW177440, D80251, AW179328, |
| | | | | | AW178775, AI905856, AW378532, |
| | | | | | Z21582, C14407, D80064, AA305578, |
| | | | | | AW377671, C14298, AW360834, |
| | | | | | AW352158, AA911255, AW369651, |
| | | | | | AA987456, D80248, AI557751, D52291, |
| | | | | | AA514186, AW178762, AA514188, |
| | | | | | AW177501, AW177511, AA285331, |
| | | | | | AA971615, D80133, AW352117, |
| | | | | | D80014, D51097, AW360811, C05695, |
| | | | | | AW352120, T11417, AW176467, |
| | | | | | AW375405, AW378540, AW179220, |
| | | | | | D80439, AW366296, AW360844, |
| | | | | | AW360817, D80132, AW375406, |
| | | | | | AW378534, AW179332, AW179024, |
| | | | | | AW377672, AW179023, AW178905, |
| | | | | | D80302, AW178983, D59373, |
| | | | | | AW177505, AW352171, D80247, |
| | | | | | AW377676, AW178906, AW352170, |
| | | | | | AW177731, AW178907, AW179019, |
| | | | | | AA916296, AW360841, AW179020, |
| | | | | | AW178909, AW177456, AW179018, |
| | | | | | AW179329, AW178980, AW177733, |
| | | | | | AW378528, AW178908, AW178754, |
| | | | | | AW378539, AW352174, AW179004, |
| | | | | | D80157, AW179012, D51103, |
| | | | | | AW178914, D51759, AW378525, |
| | | | | | T02974, AW177728, D80258, |
| | | | | | AW177722, AW367967, A62300, |
| | | | | | A62298, A84916, AR018138, AJ132110, |
| | | | | | D26022, D34614, Y17188, D88547, |
| | | | | | X67155, A25909, A78862, A67220, |
| | | | | | D89785, X82626, AR025207, AR008278, |
| | | | | | AF058696, AB012117, X68127, |
| | | | | | AB028859, I82448, A85396, AR066482, |
| | | | | | A85477, A44171, I19525, A86792, |
| | | | | | X93549, U87250, Y12724, A82595, |
| | | | | | A94995, AR060385, AB002449, |
| | | | | | AR008443, I50126, I50132, I50128, |
| | | | | | I50133, A30438, AF135125, Y17187, |
| | | | | | AR066488, AR016514, AR008277, |
| | | | | | AR008281, AR060138, A45456, A26615, |
| | | | | | AR052274, Y09669, I18367, A43192, |
| | | | | | A43190, AR038669, AR066487, |
| | | | | | AR054175, AR066490, D88507, I14842, |
| | | | | | AB033111, AR064240, D50010, X64588, |
| | | | | | U46128, AR016691, AR016690, A63261, |
| | | | | | AR008408, AR062872, A70867, D13509, |
| | | | | | A64136, A68321, AR060133, U79457, |
| | | | | | I79511, U87247, Z32749, AB023656, |
| | | | | | AF123263, AR032065, X93535, |
| | | | | | AR008382, AA953807, AW470300, and |
| | | | | | AW614715. |
| HTSHM38 | 55 | 1138085 | 1-2235 | 15-2249 | AI907172, AL043009, AI679782, |
| | | | | | AW274349, AL119691, AI431303, |
| | | | | | AW301350, AL046205, AA587604, |
| | | | | | AW407578, AI270117, AW193265, |
| | | | | | AI754658, AI350211, AA490183, |
| | | | | | AI110770, AL138265, AW103758, |
| | | | | | AL138455, AA443390, AA669840, |
| | | | | | AI613280, AI341664, AI537506, |
| | | | | | AW276827, AI289067, AA631507, |
| | | | | | AI963720, AI133164, AI708009, |
| | | | | | AW338086, AW419262, AW088202, |
| | | | | | AA470969, AA488746, F36273, |
| | | | | | AI085719, AI375710, AA613227, |
| | | | | | AL118991, AW302013, AW193432, |
| | | | | | AW410400, AI688846, AL041690, |
| | | | | | AW438643, AI345654, AW083364, |
| | | | | | AA649642, AW083402, AI358571, |
| | | | | | AI801591, AA610491, AA290878, |
| | | | | | AI053672, AI471481, AI821271, |
| | | | | | AI814735, AI539563, AI619997, |
| | | | | | AL041146, AI744995, AA829225, |
| | | | | | AA491814, AI341548, AI963263, |
| | | | | | AI358343, AI281881, AI379719, |
| | | | | | AL120269, AL038799, AI564185, |
| | | | | | AI371070, AW406162, AL079812, |
| | | | | | AL037683, AI830390, AW238278, |
| | | | | | AI061334, AW162049, AI929531, |
| | | | | | AW247819, AW408717, AW021583, |
| | | | | | AI761471, AI653636, AA164251, |
| | | | | | AI610920, AI281697, AL042753, |
| | | | | | AI799642, AI305766, AI434695, |
| | | | | | AW276435, AI889781, AA583955, |
| | | | | | AI718446, AA177061, AI358501, |
| | | | | | AA577906, AI745151, AI669453, |
| | | | | | AI151261, AW023672, AW304584, |
| | | | | | AW029038, AI568678, F32808, |
| | | | | | AI962050, AI469172, AI340453, |
| | | | | | AI144055, AI192631, AA347927, |
| | | | | | AI286356, AL038705, AA652057, |
| | | | | | AI339850, AW188484, AI919265, |
| | | | | | AI610159, AA584581, AI587583, |
| | | | | | AI587565, AA806796, AW339568, |
| | | | | | AW276817, AL119810, AI249997, |
| | | | | | AW261871, AA623002, AI567674, |
| | | | | | AI282832, AI590958, AA482768, |
| | | | | | AW088846, AA587256, AL044940, |
| | | | | | AI561060, AL042420, AI469968, |
| | | | | | AI537955, AA226153, AL119984, |
| | | | | | AA347930, AI890348, AI886629, |
| | | | | | AA831375, AA713815, AI709365, |
| | | | | | AI305547, AL135405, AW269488, |
| | | | | | AI344844, AI312309, AA621858, |
| | | | | | AI499181, AI345681, AI345675, |
| | | | | | AA526787, AA513141, AW148792, |
| | | | | | AA569387, AA551503, AI590689, |
| | | | | | AI888752, AI370074, AA682912, |
| | | | | | AL041706, AI434706, AL038785, |
| | | | | | AI287528, AA857486, AI439210, |
| | | | | | AI355224, Z98473, AW341903, |
| | | | | | AL022476, AL132987, AC009516, |
| | | | | | AP000501, AC005358, AC006285, |
| | | | | | AC006057, AC005921, U62293, U63721, |
| | | | | | AC007676, AC004812, U85195, |
| | | | | | AL008716, AC003101, Z99716, |
| | | | | | AE000658, AC004858, AC007308, |
| | | | | | AC003003, AC004263, AC000353, |
| | | | | | U95742, AL022322, AC007057, |
| | | | | | AC006088, AL031311, D84394, |
| | | | | | AC004019, AL035419, AL121653, |
| | | | | | AL049757, AC016025, AC005288, |
| | | | | | AF196971, AC004890, AP000962, |
| | | | | | Z98051, Z86090, AP000152, AC002425, |
| | | | | | AL022316, AC007686, AC005057, |
| | | | | | AL133485, AC005516, AC002996, |
| | | | | | AL008718, AP000350, U52112, |
| | | | | | AC016831, AP000112, U91326, |
| | | | | | AL035659, AC004814, AC000003, |
| | | | | | AC006001, AC004477, AL031659, |
| | | | | | AL050318, Z98742, AF053356, |
| | | | | | AC007384, AF045555, Z85986, |
| | | | | | AL022315, AF190465, AL049694, |
| | | | | | Z83822, AC006530, AC000025, |
| | | | | | AC004825, AC007536, Y14768, |
| | | | | | AP000044, AC003080, AC005844, |
| | | | | | AC005821, AC007666, AL049745, |
| | | | | | AL109798, AC005531, AL008635, |
| | | | | | AL022238, AC006536, AC002400, |
| | | | | | AL096701, AC005231, AL117354, |
| | | | | | AC009509, AL133353, AC002094, |
| | | | | | AC002126, AP000505, AC016830, |
| | | | | | AC004531, U96629, AC006111, |
| | | | | | AC005295, AF017104, AL049643, |
| | | | | | AL022163, AC006011, AJ003147, |
| | | | | | AL022323, AC000035, AP000300, |
| | | | | | AC004821, AC006480, AC004933, |
| | | | | | AC007546, AC007240, AC004859, |
| | | | | | AC006211, AL035587, AC005015, |
| | | | | | AL034549, AC005914, AC007216, |
| | | | | | AC002300, AL121655, AC004638, |
| | | | | | AC002563, AP000193, AL034451, |
| | | | | | AL121603, Z95115, AC004534, |
| | | | | | AC002430, AF088219, AC005527, |
| | | | | | Z93241, AC000052, AL024498, |
| | | | | | AP000117, AL049712, AC002350, |
| | | | | | AC001550, AL132712, AF196970, |
| | | | | | AC002312, M63480, Z94056, AF109907, |
| | | | | | AC004822, AC005102, AP000045, |
| | | | | | AP000113, AC005332, AL121652, |
| | | | | | AF001552, X60459, AC002369, |
| | | | | | AP000814, AC004491, AC005829, |
| | | | | | AL049795, U91322, AP001053, |
| | | | | | AC006050, L44140, Z98044, AL022329, |
| | | | | | AL009177, AC004967, AC007011, |
| | | | | | AC005740, AF060568, AC007036, |
| | | | | | AC000026, AC005011, AL031432, |
| | | | | | AC000134, AF134726, U91321, |
| | | | | | AL023807, AF196779, AC020663, |
| | | | | | AC011311, AC002551, AC005412, |
| | | | | | AC005089, M63544, AC002492, |
| | | | | | AC007073, AC007541, AC002115, |
| | | | | | AC006006, AL022721, AC007014, |
| | | | | | AC005839, AP000359, AC005031, |
| | | | | | AL080242, AC004522, AC004815, |
| | | | | | AF001549, AL135744, AC002477, |
| | | | | | AL049869, AC005529, AC004765, |
| | | | | | AC004895, AC007773, AP000553, |
| | | | | | AC006130, AF165147, AC007225, |
| | | | | | AC001234, AC005071, D87675, |
| | | | | | AC002544, AC005261, AC004972, |
| | | | | | AL078463, AC005399, AL035684, |
| | | | | | AL049779, AP000297, AL035681, |
| | | | | | AC002117, AC005244, AP000555, |
| | | | | | AC004922, AC005619, AL031319, |
| | | | | | AP000010, AC004686, AF111167, |
| | | | | | AC004643, AL117258, AC005822, |
| | | | | | AC004417, AC006205, AL078476, |
| | | | | | AL033525, AC016026, AC002395, |
| | | | | | AL109984, AC006014, AL049872, |
| | | | | | AC007066, AC007262, AL049713, |
| | | | | | AC004408, AC005722, Z82214, |
| | | | | | AC007919, AF015262, and AC008115. |
| HELDY60 | 56 | 1056195 | 1-3709 | 15-3723 | AW368397, AI679767, AI298034, |
| | | | | | AI681770, T86312, AA332746, |
| | | | | | AA379823, AA135903, D62730, and |
| | | | | | T93939. |
| HNALE30 | 57 | 1219068 | 1-1915 | 15-1929 | AL043399, AL043397, R36317, R60363, |
| | | | | | AA229782, W19800, Z44585, T84431, |
| | | | | | R73933, W19896, W68673, AA229886, |
| | | | | | AA781657, R25660, AW407804, R15164, |
| | | | | | W45109, AA724662, D83778, and |
| | | | | | U63963. |
| HWADY16 | 58 | 1182316 | 1-993 | 15-1007 | AI245977, AI739455, AI418285, |
| | | | | | AI739445, AI992157, AW453013, |
| | | | | | AI333190, AI369184, AI539630, |
| | | | | | AI278907, AI276810, AW028204, |
| | | | | | AI241009, AA143160, AA283147, |
| | | | | | AI739368, AI198469, AI246744, |
| | | | | | AW296566, N39722, N28707, |
| | | | | | AA765166, AI682209, AA142881, |
| | | | | | AA232819, AI498387, AA233873, |
| | | | | | AC007785, and AW469104. |
| HNTRU73 | 59 | 1173875 | 1-516 | 15-530 | AI492198, W44823, AA381672, |
| | | | | | AB002357, and D26077. |
| HLHCR16 | 60 | 910123 | 1-3790 | 15-3804 | AA402528, AI379350, AA716107, |
| | | | | | AI123557, AI127175, AA234106, |
| | | | | | AA234698, AI039768, N77999, |
| | | | | | AI580137, AA424560, AA419490, |
| | | | | | AI334141, R71349, AI224976, AI417798, |
| | | | | | AI080508, N58410, AI818475, |
| | | | | | AA424657, N91089, AA399612, |
| | | | | | AI144265, AA399137, AI498363, |
| | | | | | AA410986, AA235306, AA399148, |
| | | | | | AW292497, AI249102, W86869, |
| | | | | | AA115407, H81257, AI077499, H00194, |
| | | | | | H45499, R01206, AW104245, |
| | | | | | AA234880, AA367417, AA852175, |
| | | | | | F05822, AA853077, AA852176, R82875, |
| | | | | | H81245, AA298421, R71350, R22096, |
| | | | | | H81585, AI985171, T49265, H81591, |
| | | | | | AA115408, R64037, T54283, AI492930, |
| | | | | | AI492932, R82876, R81695, R33935, |
| | | | | | R34138, R25630, H81595, R32025, |
| | | | | | R81696, T49264, R95688, R01319, |
| | | | | | R22040, Z21579, R33043, Z38741, |
| | | | | | AA514393, T97662, T34993, AA705441, |
| | | | | | D79105, R32078, H45500, AA707178, |
| | | | | | R30943, H81576, H81250, AI032721, |
| | | | | | AL079279, and I76197. |
| HFKJO15 | 61 | 910828 | 1-526 | 15-540 | AI148246, AW241903, AA234558, |
| | | | | | AC007731, AC005500, AC000096, |
| | | | | | AC007731, AC007731, AC005500, and |
| | | | | | AC005500. |
| HMEIS32 | 62 | 1164006 | 1-1722 | 15-1736 | AL039245, AI955098, AI857804, |
| | | | | | AI355557, AI469403, AW249170, |
| | | | | | AW167089, AW264538, AI922792, |
| | | | | | AI090862, AA614415, AW015755, |
| | | | | | AI589853, AI970459, AW264730, |
| | | | | | AW302158, AI591130, AI990223, |
| | | | | | AI860824, AW248743, AA954810, |
| | | | | | AI652051, AI634311, AI739259, |
| | | | | | AI886436, AW196771, AW078970, |
| | | | | | AA908313, AI798561, AI611669, |
| | | | | | AA506437, AW079611, AI912359, |
| | | | | | AA131747, F37324, AW183471, |
| | | | | | W19261, F27752, AW339361, |
| | | | | | AA679753, AA414635, AA962100, |
| | | | | | AA330885, H91413, AI869375, |
| | | | | | AI829609, AW297389, AA465711, |
| | | | | | AW050424, AA131835, AA355811, |
| | | | | | AI587515, AA583508, AI583202, and |
| | | | | | D63481. |
| HOGDR01 | 63 | 1133383 | 1-1425 | 15-1439 | AI805425, AW273749, AA884001, |
| | | | | | AW276210, AW317074, AW295870, |
| | | | | | AW383315, AW152554, AI940071, |
| | | | | | AI969215, AW383305, AW383297, |
| | | | | | AW083601, AI249364, AI566393, |
| | | | | | AI739044, AI357916, AI671350, |
| | | | | | AW304326, AW079920, AW083723, |
| | | | | | AI274014, AW392670, AL119324, |
| | | | | | AL119399, AL134527, AW384394, |
| | | | | | AW363220, U46351, AL119443, U46347, |
| | | | | | AL119522, AW372827, Z99396, |
| | | | | | AL119319, AL042544, AL119457, |
| | | | | | AL119418, AL134902, U46350, |
| | | | | | AL119439, U46349, AL119484, |
| | | | | | AL119391, AL043003, AL119483, |
| | | | | | AL119497, AL119401, AL119363, |
| | | | | | AL119444, AL119355, AL119396, |
| | | | | | AL134525, AL037205, U46341, |
| | | | | | AL134531, AL119464, AL042984, |
| | | | | | U46346, AL119335, AL042542, |
| | | | | | AL134538, AL043019, AL042965, |
| | | | | | AL042975, U46345, AL042614, |
| | | | | | AL043029, AL042989, AL042450, |
| | | | | | AL042551, AC003965, AR066494, |
| | | | | | AB026436, AR069079, AR060234, |
| | | | | | A81671, AR054110, AW469217, |
| | | | | | AW513945, and AW627349. |
| HISBG28 | 64 | 1180262 | 1-2717 | 15-2731 | AI810118, AA909711, AA481627, |
| | | | | | AW104339, AA651933, AI016329, |
| | | | | | AI075273, AA992565, AA927147, |
| | | | | | AA829327, AA766107, AA805533, |
| | | | | | AI002215, AA808082, AA883142, |
| | | | | | AW027440, AA705065, AA811592, |
| | | | | | AA490829, AA765432, AI636538, |
| | | | | | AA648823, AA868183, AA719942, |
| | | | | | AA904820, H65033, AI884514, |
| | | | | | AI185534, AA732713, AW376426, |
| | | | | | AA766740, AI888635, AW292729, |
| | | | | | H65034, I22485, L12052, U67932, |
| | | | | | U68171, and U77880. |
| HBJIG82 | 65 | 1151379 | 1-581 | 15-595 | AW161406, W22101, AW081698, |
| | | | | | AA976942, AI349772, AI499463, |
| | | | | | AW135090, AL121270, AL135661, |
| | | | | | AI633419, AW268253, AL045500, |
| | | | | | AW071349, AL036146, AI312428, |
| | | | | | AL036802, AW104724, AI868831, |
| | | | | | AI684265, AL036396, AI433157, |
| | | | | | AI064830, AI349645, AI500077, |
| | | | | | AL047763, AI580190, AI433976, |
| | | | | | AI436456, AL047042, AL120854, |
| | | | | | AW302965, AA613907, AW162071, |
| | | | | | AL119049, AL119748, AI682743, |
| | | | | | AL119791, AA640779, AW002342, |
| | | | | | AI590120, AL040169, AI439717, |
| | | | | | AI345735, AI469532, AI906328, |
| | | | | | AI567351, AI207510, AI699857, |
| | | | | | AW238730, AI349614, AI349598, |
| | | | | | AI610645, AI349933, AI538716, |
| | | | | | AA987764, AI282903, AL046849, |
| | | | | | AI568870, AI500553, AI340582, |
| | | | | | AI920968, AW132034, AW166645, |
| | | | | | AI678302, AW118512, AI521012, |
| | | | | | AI570384, AI349004, AL036274, |
| | | | | | AI273142, AL120736, AI269696, |
| | | | | | AW268220, AI815383, AI648684, |
| | | | | | AI873731, AW074993, AW080838, |
| | | | | | AW103371, AW087445, AI687376, |
| | | | | | AA326433, AI569616, AL036759, |
| | | | | | AI312152, AW117882, AW131954, |
| | | | | | AW301409, AI907070, AI349937, |
| | | | | | AW089572, AI334884, AL045266, |
| | | | | | AI702406, AI863014, AI249257, |
| | | | | | AI952360, AI636445, AI273048, |
| | | | | | AW196141, AI612920, AI554484, |
| | | | | | AI811344, AI610756, AL036361, |
| | | | | | AI912866, AI571551, AI690312, |
| | | | | | AI934036, AI857296, AW071417, |
| | | | | | AI690751, AI475451, AI824557, |
| | | | | | AI702433, AI224992, AI799199, |
| | | | | | AI554427, AW082040, AI309401, |
| | | | | | AI613017, AI498579, AI866002, |
| | | | | | AI828731, AI612759, AI340519, |
| | | | | | AL038565, AI873704, AI349256, |
| | | | | | AI815855, AI636719, AL044207, |
| | | | | | AI539153, AI539771, AI687415, |
| | | | | | AI866608, AI679724, AI567632, |
| | | | | | AI343112, AI919345, AL036980, |
| | | | | | AI282655, AI480118, AA585422, |
| | | | | | AI440426, AI255071, AI969601, |
| | | | | | AI097248, AI590999, AL043326, |
| | | | | | AI800453, AI800433, AL036403, |
| | | | | | AI149592, AI281779, AI554818, |
| | | | | | AI445165, AI348897, AI591316, |
| | | | | | AW271835, AI753683, AI538829, |
| | | | | | AW149869, AW169653, AI536638, |
| | | | | | AI702068, AW151485, AI627360, |
| | | | | | AI249323, AW075084, AI590128, |
| | | | | | AI274541, AI758437, AI269205, |
| | | | | | AI682841, AI624206, AI458584, |
| | | | | | AW008048, AI637646, AI637584, |
| | | | | | AI307708, AI922901, AI608667, |
| | | | | | AI308035, AI926790, AW132121, |
| | | | | | AW268251, AI564719, AI889376, |
| | | | | | AL038605, AI524671, AI921248, |
| | | | | | AW301410, AI619502, AI284020, |
| | | | | | AW303152, AI802542, AI569583, |
| | | | | | AW026882, AI783504, AL079963, |
| | | | | | AW163611, AI620284, AW074869, |
| | | | | | AI537677, AI702073, AI445025, |
| | | | | | AW088793, AI801213, AA446363, |
| | | | | | AI566507, AI572676, AL119863, |
| | | | | | AI813914, AW079368, AW087462, |
| | | | | | AI673256, AI587288, AI499263, |
| | | | | | AW274192, AI491852, AI500523, |
| | | | | | AW129202, AI446605, AI687728, |
| | | | | | AW262565, AL121365, AI872711, |
| | | | | | AI362637, AA572758, AI801544, |
| | | | | | AW103893, AI561299, AW090013, |
| | | | | | AW149851, AI560099, AI560012, |
| | | | | | AI270707, AI520793, AI275175, |
| | | | | | AI612913, AI281837, AI571909, |
| | | | | | AW132056, AI696612, AL040243, |
| | | | | | AC004775, AC005742, D86957, A87006, |
| | | | | | I48979, S78214, L31396, L31397, |
| | | | | | AL133640, AF113013, AF078844, |
| | | | | | AF090943, AF090934, AF090900, |
| | | | | | AF118070, AL133016, AF113691, |
| | | | | | AL050393, AF118064, AL110196, |
| | | | | | AL050146, Y11587, AF090903, |
| | | | | | AF090901, AL049938, A93016, |
| | | | | | AL117460, AF125949, AL133606, |
| | | | | | AB019565, I89947, AL117457, |
| | | | | | AF180525, AL122050, AL080137, |
| | | | | | AF113694, I89931, S68736, AF104032, |
| | | | | | Y16645, AJ242859, AL080060, A08916, |
| | | | | | AL050108, A08913, AL122093, |
| | | | | | AL133093, AL049452, AL133565, |
| | | | | | AL110221, AF017152, AF090896, |
| | | | | | AF413677, AL080124, AL137527, |
| | | | | | AF113690, AF113019, E03348, X84990, |
| | | | | | I48978, AF113699, AL133557, |
| | | | | | AL122121, AL122123, AL050116, |
| | | | | | U42766, AF113689, AR059958, |
| | | | | | AF111851, AL133075, AL050149, |
| | | | | | AF113676, AF158248, X63574, |
| | | | | | AF106862, AL137557, Y11254, |
| | | | | | AL133080, AL049314, E07361, |
| | | | | | AF125948, AL049466, AL096744, |
| | | | | | AF091084, AJ000937, U91329, X82434, |
| | | | | | AL050277, AL137459, AL050138, |
| | | | | | AF146568, AF097996, AL137283, |
| | | | | | AL117394, AF079765, I49625, |
| | | | | | AL117585, AL110225, AR011880, |
| | | | | | AL049300, AL133560, AL049464, |
| | | | | | AF017437, A65341, AL137550, A08910, |
| | | | | | AJ238278, AF177401, AF067728, |
| | | | | | E02349, A08912, E07108, AL049430, |
| | | | | | AL117583, AL049382, U00763, |
| | | | | | AL050024, X70685, AF183393, |
| | | | | | AL117435, I33392, AL137271, A08909, |
| | | | | | Z82022, A58524, A58523, AL122098, |
| | | | | | AL137538, X72889, AF118094, |
| | | | | | AF087943, I03321, A77033, A77035, |
| | | | | | AL080127, I42402, AL133113, U72620, |
| | | | | | A12297, AL122110, AL137463, X96540, |
| | | | | | AL137648, X65873, U35846, I09360, |
| | | | | | U67958, A03736, AL049283, X93495, |
| | | | | | AL137521, U80742, S61953, AF061943, |
| | | | | | AJ012755, AC006336, AF119337, |
| | | | | | AL133072, AL110197, X98834, |
| | | | | | AF026816, E15569, I17767, AL080159, |
| | | | | | Y09972, AL023657, Z72491, AL133568, |
| | | | | | E08263, E08264, AL137526, AR000496, |
| | | | | | U39656, AF095901, AC004987, |
| | | | | | AL050172, AL133104, AL137523, |
| | | | | | I00734, I66342, M30514, E00617, |
| | | | | | E00717, E00778, AF111112, E05822, |
| | | | | | AL137560, A93350, L13297, AL110280, |
| | | | | | A08911, I26207, AL022147, AF106827, |
| | | | | | AF026124, AL133067, AC004690, |
| | | | | | AF000145, AL133077, AL122111, |
| | | | | | AR038969, AL035067, AL137556, |
| | | | | | AF100931, AL122049, AL080074, |
| | | | | | A07647, AF091512, AL137533, |
| | | | | | AL133014, AC004093, AL133098, |
| | | | | | Z37987, AC004200, AF079763, |
| | | | | | AF003737, AF132676, AF061836, |
| | | | | | AIF153205, U96683, Y07905, AC006371, |
| | | | | | Y14314, A90832, E04233, X62580, |
| | | | | | AF185576, X87582, AJ006417, |
| | | | | | AF057300, AF057299, X83508, U49908, |
| | | | | | AR013797, and AF100781. |
| HBMXS88 | 66 | 1162642 | 1-1606 | 15-1620 | AI949632, AI354431, AI651157, |
| | | | | | AW386234, AA236937, AI582330, |
| | | | | | AW138858, W58355, AI051321, |
| | | | | | AA455638, AI819589, AA780023, |
| | | | | | AI040449, AA237086, AI579904, |
| | | | | | AA815150, AI989896, W90300, |
| | | | | | AA582235, AI076754, AA455691, |
| | | | | | AI086973, R51088, W90641, AI079206, |
| | | | | | AI363297, R89165, AA705343, |
| | | | | | AA676557, AA025508, AW393458, |
| | | | | | AI005395, AI312921, AA701484, |
| | | | | | AA973550, AW075301, AI697773, |
| | | | | | AA810053, AA045824, AA806111, |
| | | | | | AI204604, AA295260, AA045939, |
| | | | | | AI767182, AA902496, AA295048, |
| | | | | | R35520, AI701757, AW050442, N47376, |
| | | | | | AA613051, AI419623, AA317608, |
| | | | | | AA025911, AA779479, AF151811, |
| | | | | | L38481, and Z98752. |
| HE8UL90 | 67 | 1226071 | 1-2743 | 15-2757 | AF154671. |
| HWHGF95 | 68 | 1152274 | 1-1361 | 15-1375 | AA583908, AF135026, and AB012761. |
| HNKAZ51 | 69 | 1152347 | 1-910 | 15-924 | U77054. |
| HFKKE19 | 70 | 1127465 | 1-740 | 15-754 | AI866028, D87469, and AL031597. |
| HILBH66 | 71 | 1048931 | 1-676 | 15-690 | AW271361, AI669661, AI066605, |
| | | | | | AA425588, AI735664, AA195146, |
| | | | | | W74608, AW027978, AI018730, |
| | | | | | AI935510, AI185633, AW043919, |
| | | | | | AA993404, AI640585, AI927620, |
| | | | | | AW002498, AI934436, AI559981, |
| | | | | | AI968681, AI672299, AI422678, |
| | | | | | AA569942, AI378894, AI659268, |
| | | | | | AI273512, AI436227, AI363301, |
| | | | | | AA766347, AI380745, AI206984, |
| | | | | | W94646, AA773648, AI094063, |
| | | | | | AA628526, AA989426, AA889351, |
| | | | | | AA883824, AW002369, AI355683, |
| | | | | | AI373924, AI817823, AI763339, |
| | | | | | AI278238, AI767047, AA889352, |
| | | | | | AI127585, AI360752, AA195282, |
| | | | | | AI971450, AI132981, AI962756, |
| | | | | | AA902222, AI767875, W94385, |
| | | | | | AA569949, AI468466, AI240574, |
| | | | | | AI190556, AW013937, AI240575, |
| | | | | | AW104888, W94608, AW268725, |
| | | | | | AI133092, H79051, AI140477, AI366169, |
| | | | | | AA425451, T28917, D59520, AA657883, |
| | | | | | AI202549, AI205492, AI916042, |
| | | | | | AI695700, AI184045, AW104299, |
| | | | | | AA503512, AI648700, AI743100, |
| | | | | | AI824883, AI652636, AA091770, |
| | | | | | AI982950, AA994143, AI383570, |
| | | | | | AA918387, AW298255, N40872, |
| | | | | | AW204184, AI355665, AA748371, |
| | | | | | N30085, L25851, I33984, AF020046, |
| | | | | | U12236, AF020045, AW510360, and |
| | | | | | AW591932. |
| HWMEQ37 | 72 | 1226808 | 1-1781 | 15-1795 | AI924527, AI924182, AI597567, |
| | | | | | AI368169, AA143746, AA143761, |
| | | | | | AW292063, AA126071, D31382, |
| | | | | | AW177469, AA056638, AI056960, |
| | | | | | AI084845, AW177487, T79589, U54603, |
| | | | | | AW352026, AW365560, AI927431, |
| | | | | | AA641005, AI762083, AI380837, |
| | | | | | AW177675, AW271159, AW178439, |
| | | | | | AI587618, AF216312, E13203, and |
| | | | | | AW613143. |
| HFKHD91 | 73 | 1165344 | 1-1355 | 15-1369 | AI858128, AA422028, W74456, |
| | | | | | AI524577, W79191, and AB023193. |
| HUSXE73 | 74 | 1127979 | 1-1295 | 15-1309 | AW138763, AI968244, AI671228, |
| | | | | | AI146849, AI650986, AA974891, |
| | | | | | AI935406, AI375139, AI632343, |
| | | | | | AI580312, AI190358, AI823383, |
| | | | | | AA758662, AW166381, AI816934, |
| | | | | | AI362170, AI307616, AI339511, |
| | | | | | AI092493, AI193719, AA676785, |
| | | | | | AA701414, AI375073, AI090245, |
| | | | | | AI077483, AW003931, N70081, |
| | | | | | AI307365, AI991601, AI967935, |
| | | | | | AI990350, AI637874, AI825545, |
| | | | | | AI621021, W67234, AI186726, |
| | | | | | AW206481, N30322, AW140070, |
| | | | | | AW338117, AA031644, AI095704, |
| | | | | | H00954, AI859068, AW136394, |
| | | | | | AW263085, R39467, AI984849, |
| | | | | | AW338430, AI219050, AI334231, |
| | | | | | R62632, AI241351, AI355851, AI334036, |
| | | | | | AA449686, AI336416, H72039, |
| | | | | | AI735518, AA699736, R39468, F26300, |
| | | | | | R30863, AI130689, W67345, AI620138, |
| | | | | | AA358091, N74688, AA704504, |
| | | | | | AI524317, AI183860, AI801924, R74316, |
| | | | | | AI933476, AI933484, AA448958, |
| | | | | | H16951, N56653, R62685, AI634964, |
| | | | | | AA031725, H72038, T19026, AI433512, |
| | | | | | H00953, R31133, AW192226, |
| | | | | | AW235028, AI888621, AW190428, |
| | | | | | AI805638, AW029072, AI539153, |
| | | | | | AI628292, AI921082, AI379711, |
| | | | | | AW029606, AW188491, AI583533, |
| | | | | | AW002174, AI091468, AI598113, |
| | | | | | AI636719, AI358455, AI620093, |
| | | | | | AI566507, AI498579, AW168723, |
| | | | | | AI811192, AI207454, AW088899, |
| | | | | | AI366549, AL046463, AI866608, |
| | | | | | AI874410, AI611743, AW083804, |
| | | | | | AW118332, AA830821, AI696626, |
| | | | | | AI589993, AI365256, AW085786, |
| | | | | | AI805769, AW265004, AI677797, |
| | | | | | AI364788, AI648567, AW089801, |
| | | | | | AI636619, AI866786, AW051107, |
| | | | | | AI866082, N74355, AI282651, |
| | | | | | AW129271, AI863397, AI310155, |
| | | | | | AI952920, AI536557, AW172723, |
| | | | | | AA579232, AW403717, AI539771, |
| | | | | | AW131954, AA420722, AI919345, |
| | | | | | AI805688, AI251830, AI565125, |
| | | | | | AI862324, AA807352, AW168373, |
| | | | | | R40432, AI539632, AI470701, AI738867, |
| | | | | | AI312428, AI434242, AI371228, |
| | | | | | AI801605, AW080080, AI610429, |
| | | | | | AW168425, AI432736, AI307736, |
| | | | | | AI473598, AI499986, AI273839, |
| | | | | | AA928539, AI872064, AI568870, |
| | | | | | AI868831, AI869750, W33163, |
| | | | | | AI874151, AI950664, AI436429, |
| | | | | | AW087901, AI470293, AI570966, |
| | | | | | AI867042, AW082040, AI929108, |
| | | | | | AI537837, AI573026, AI699862, |
| | | | | | AI859464, AI242646, W46547, |
| | | | | | AI445430, AI249877, AI862144, |
| | | | | | AI689420, AI879693, AI249946, |
| | | | | | AW130863, AI922577, AA848053, |
| | | | | | AW059713, AW068845, AI345677, |
| | | | | | AI274769, AI554218, AW192375, |
| | | | | | AA572758, AI872051, AI375730, |
| | | | | | AW161892, AI800152, AW191844, |
| | | | | | AI917055, AW151750, AI702301, |
| | | | | | AW088134, AI500146, AI699255, |
| | | | | | AI570384, AI633477, AI680498, |
| | | | | | AA176980, AI453413, AI370390, |
| | | | | | AL047344, AI499512, AW162194, |
| | | | | | AI889147, AI678411, AI636445, |
| | | | | | AI494201, AI561299, AA693347, |
| | | | | | N71180, AI686823, AI539071, AI537307, |
| | | | | | AI674838, AA761557, AI344935, |
| | | | | | AI886124, AI476077, N75771, AI885974, |
| | | | | | AL036718, AI872074, AI560010, |
| | | | | | AI537617, AI311892, AI623682, |
| | | | | | AF186111, AR059958, AL137556, |
| | | | | | AL122121, AL136842, AL133093, |
| | | | | | AL122111, AL080127, A08910, A08909, |
| | | | | | A08908, I41145, E15324, AJ242859, |
| | | | | | AF113676, A08916, AL133645, I00734, |
| | | | | | A18777, AR019470, E00617, E00717, |
| | | | | | E00778, AL035458, I89947, I48978, |
| | | | | | A08913, I89931, AL133077, AF090896, |
| | | | | | I49625, A08912, AR038854, AB019565, |
| | | | | | AF093119, AL133104, X62580, I26207, |
| | | | | | AL137527, AF000145, AL080060, |
| | | | | | X52128, AL080158, AF051325, E08631, |
| | | | | | D44497, AC002467, X53587, AF119337, |
| | | | | | A90832, AF097996, X70685, AL133075, |
| | | | | | AL080137, AL133031, AL122123, |
| | | | | | AL137300, AIF012536, L13297, X92070, |
| | | | | | A23630, AL133081, AL117585, |
| | | | | | AF004162, U72620, AL122050, |
| | | | | | AL137281, AL137648, U96683, |
| | | | | | AL133568, AF085809, AL133080, |
| | | | | | AL122098, AF125949, AL137273, |
| | | | | | X93495, AF081197, AF081195, I89934, |
| | | | | | I89944, M86826, AL133067, I09360, |
| | | | | | I33392, AL049466, I68732, AL137665, |
| | | | | | S68736, AL080086, AF003737, |
| | | | | | AF110329, Z72491, AF106827, L30117, |
| | | | | | U55017, AF017152, AF090886, |
| | | | | | AL133014, A12297, AL133072, X65873, |
| | | | | | AJ006417, E15569, AL049465, |
| | | | | | AL137429, E03348, AF031903, |
| | | | | | AL137557, AL137258, U68233, I92592, |
| | | | | | E07108, AF158248, AL122118, |
| | | | | | AL110222, U91329, S76508, AL137479, |
| | | | | | X72889, AF113691, AL137463, S61953, |
| | | | | | AL122049, AF118064, AF118070, |
| | | | | | AJ000937, AL133098, AJ238278, |
| | | | | | D89079, AL133557, I30339, I30334, |
| | | | | | Y09972, U49434, U80742, AL137705, |
| | | | | | AL133113, AF026816, AL117432, |
| | | | | | X81464, AF111112, AF162270, U00763, |
| | | | | | AL137283, AL049938, AL049283, |
| | | | | | U67958, AL049382, I42402, AF111851, |
| | | | | | AF210052, I17767, AF159148, |
| | | | | | AL137538, AL137529, AL117457, |
| | | | | | S77771, AL096744, AJ003118, |
| | | | | | AL050146, AF106862, AF067790, |
| | | | | | Y10655, Y10080, E02253, Y10936, |
| | | | | | AR000496, U39656, AR038969, A49139, |
| | | | | | Z37987, U00686, AF040751, AL050108, |
| | | | | | S79832, AF022363, M92439, AL110218, |
| | | | | | A93016, AF113013, L04849, A08907, |
| | | | | | AF078844, AF091084, AL137526, |
| | | | | | X87582, E05822, AF132676, AF061836, |
| | | | | | AL117583, X67688, X84990, E06788, |
| | | | | | E06790, E06789, I09499, A45787, |
| | | | | | I66342, AL137294, AL050138, |
| | | | | | AL122110, AL137574, AL050277, |
| | | | | | E04233, AL110196, AL049314, |
| | | | | | AF079763, A07647, AL137712, U68387, |
| | | | | | AL110225, AL117394, AF069506, |
| | | | | | AL050393, U42766, AL133565, |
| | | | | | AL133606, X63574, AF061573, |
| | | | | | AF057300, AF057299, U88966, |
| | | | | | AF142672, A21103, AL110197, |
| | | | | | AF028823, AF100931, AF113689, |
| | | | | | AF126247, L19437, Y11587, AL137478, |
| | | | | | AL080159, AL137640, AL133640, |
| | | | | | AB007812, AF061795, Y14314, |
| | | | | | AF151685, AL133016, AL117440, |
| | | | | | AF061981, U78525, AL080148, |
| | | | | | AF030513, and I48979. |
| HNFCS26 | 75 | 899406 | 1-1687 | 15-1701 | H70763, AW376414, AW403498, |
| | | | | | AW205281, AW204171, AW450761, |
| | | | | | AI571894, AF114491, AC004262, |
| | | | | | AC005327, AC004999, AF053356, |
| | | | | | AC004841, AL021707, AC003010, |
| | | | | | AC004834, AC007151, M22403, |
| | | | | | AC007663, and AL034400. |
| HCE3H08 | 76 | 959861 | 1-1945 | 15-1959 | AW195880, AW028792, AI422839, |
| | | | | | AW296915, AW450528, AI978638, |
| | | | | | AI359463, AI688389, AI092026, |
| | | | | | AL138368, AI809106, AA405082, |
| | | | | | AI696811, AI241174, AI362203, |
| | | | | | AI751933, AI148259, AI760309, |
| | | | | | AI377870, AA764773, AI083661, |
| | | | | | AI452823, AI217412, AW291328, |
| | | | | | AI699316, AI858566, AI538545, |
| | | | | | AA694237, AA916467, AI424728, |
| | | | | | AW204251, AI356327, AI475515, |
| | | | | | AI378101, AI081264, AI762488, |
| | | | | | AW104976, AA515713, AI365463, |
| | | | | | H64877, AI400724, AI356328, H85225, |
| | | | | | T82265, AA843157, AA367751, |
| | | | | | AI243077, R36038, AA883597, |
| | | | | | AA325102, AI081265, AW086158, |
| | | | | | W01119, N58868, F07321, F07322, |
| | | | | | Z44523, N27294, N31581, F07356, |
| | | | | | AI370163, AA749270, H12737, T83552, |
| | | | | | AA878970, H84896, AI915401, N40032, |
| | | | | | AI872672, H03282, AA810842, W46869, |
| | | | | | W46820, AA443674, R56546, R06288, |
| | | | | | N87052, AA339608, AA252843, |
| | | | | | AA385629, and AB007956. |
| HETKR83 | 77 | 1225819 | 1-2219 | 15-2233 | AW195777, AW269932, W29010, |
| | | | | | AI829559, AI571060, AI083491, |
| | | | | | AA905071, AW118125, AI376671, |
| | | | | | AI049799, AI393483, W22553, N90902, |
| | | | | | W27632, AI273588, AI890622, W22119, |
| | | | | | W27896, AI194027, N92239, AA040604, |
| | | | | | W23268, W38638, W37154, AA904910, |
| | | | | | W27944, R55894, W27681, C14616, |
| | | | | | AA337059, AW367713, AA897696, |
| | | | | | AA017680, C02576, H83294, C14877, |
| | | | | | AA298658, R55809, AA364393, |
| | | | | | W23093, W28670, W27851, AW086128, |
| | | | | | H83295, D81988, W27371, D60284, |
| | | | | | AA040705, AF122922, and AF122923. |
| HCUAZ04 | 78 | 1207329 | 1-714 | 15-728 | AA723370, AI298971, AA854333, |
| | | | | | AI942475, AW328162, AW075555, |
| | | | | | AI376901, AI458456, AA775453, |
| | | | | | AI458455, AA782728, AA449945, |
| | | | | | AI051524, AI370872, AI188379, |
| | | | | | AI042548, AI193568, H72858, |
| | | | | | AA621746, AW071755, AI362906, |
| | | | | | AI884989, AI936998, AA847549, |
| | | | | | AA664042, AI936930, AA663982, |
| | | | | | N36925, AI497960, AI497929, AI244325, |
| | | | | | AI768357, AI287500, AA040876, |
| | | | | | AA181903, AA448965, H10076, |
| | | | | | AA970020, AA834370, AI698887, |
| | | | | | AI263335, AI016859, AI287835, |
| | | | | | AI192299, AI150936, AI219081, Z38369, |
| | | | | | AW135780, T99077, AI214680, |
| | | | | | AI350093, T91018, AI351313, |
| | | | | | AW150403, C01768, N36028, |
| | | | | | AA811294, AA449692, AA503553, |
| | | | | | N93835, N77563, AA766732, C04735, |
| | | | | | F07251, W03729, AA828413, AA907195, |
| | | | | | AA588280, AI539572, and AF151863. |
| HCE3J83 | 79 | 968823 | 1-539 | 15-553 | AW069736, AA449593, AL079833, |
| | | | | | AA207229, AW444578, AW402682, |
| | | | | | AA471151, AF044588, and AC015841. |
| HAPOI67 | 80 | 971184 | 1-2190 | 15-2204 | H70763, H70762, AW376414, |
| | | | | | AW403498, AI571894, AW450761, |
| | | | | | AF114491, AC004262, and AC005327. |
| HE8NI05 | 81 | 1216548 | 1-2866 | 15-2880 | AI468004, AI924049, AA243790, |
| | | | | | AI811485, AI828757, AA916944, |
| | | | | | AA620465, AL134851, AW023721, |
| | | | | | N70192, AA361686, AA894452, |
| | | | | | AA136774, AI187979, N98388, |
| | | | | | AW295746, T25746, and AF166350. |
| HHENW06 | 82 | 1040263 | 1-2535 | 15-2549 | AI800218, AI346281, AI983710, |
| | | | | | AW026429, AI583539, AW264048, |
| | | | | | AI911743, AI766300, AI924093, |
| | | | | | AI264211, AI312053, AI201482, |
| | | | | | AI955668, AW058431, AW387854, |
| | | | | | AW196781, AI022218, AI565141, |
| | | | | | AI689249, AI276048, AI566956, |
| | | | | | AI920904, AW193090, AI623560, |
| | | | | | AA922838, AI306731, AW090493, |
| | | | | | AW299693, AI970021, AI983726, |
| | | | | | AI799761, AA526367, AW193893, |
| | | | | | AA453713, AI932812, AI800835, |
| | | | | | AI796911, R60430, C75200, H06926, |
| | | | | | H15208, W45378, AI280339, AA454508, |
| | | | | | AA194058, N26161, AI983692, T66357, |
| | | | | | AI798566, AA454904, F26986, |
| | | | | | AI653931, AA477573, T53415, |
| | | | | | AA159069, T56771, AI826240, D60131, |
| | | | | | AW168713, AW134730, AA496515, |
| | | | | | AI031629, AW167393, AA159059, |
| | | | | | AI701189, AI955982, F08019, AI244082, |
| | | | | | F06846, AW024803, AA720931, |
| | | | | | W40388, AW438920, AA496449, |
| | | | | | AA368933, AI382466, AW009728, |
| | | | | | AW176258, AW024804, AI910614, |
| | | | | | AW129533, AW070799, AW148513, |
| | | | | | H15148, AI434125, AW136838, |
| | | | | | AW073374, AA160862, AI269636, |
| | | | | | AW105266, AA454830, AA889374, |
| | | | | | AI683492, AI536855, AW268122, |
| | | | | | AW117746, AI886123, AI873644, |
| | | | | | AI432040, AW105431, AI445992, |
| | | | | | AI499986, AL036638, AW130930, |
| | | | | | AI445990, AI863191, AL045266, |
| | | | | | AA908294, AI697324, AL119791, |
| | | | | | AW302973, AI308035, AW268060, |
| | | | | | AW168031, AI866751, AI637748, |
| | | | | | AI280732, AI627880, AI866770, |
| | | | | | AI890907, AI886753, AW163823, |
| | | | | | AI886181, AI499285, AA569863, |
| | | | | | AI678357, AI537261, AI500523, |
| | | | | | AA704013, AI345416, AI345612, |
| | | | | | AW268302, AI538342, AI620089, |
| | | | | | AW072719, AW168485, AI933589, |
| | | | | | AI345131, AI270183, AW149925, |
| | | | | | AI863321, AI345415, AI874166, |
| | | | | | AI582932, AI921248, AI611738, |
| | | | | | AI476527, AI434741, AI619502, |
| | | | | | AW079572, AI632408, AI677796, |
| | | | | | AI802542, AA449768, AI288305, |
| | | | | | AI539028, AI288285, AW118518, |
| | | | | | AI570807, AI635067, AW026882, |
| | | | | | AI932794, AI923370, AI868931, |
| | | | | | AI620284, AI520809, AW003208, |
| | | | | | AI699865, AI886192, AI863382, |
| | | | | | AI433157, AW172723, AI702073, |
| | | | | | AI582483, AI783997, AI698391, |
| | | | | | AI783504, AL079963, AI913452, |
| | | | | | AI623941, AI500061, AI648663, |
| | | | | | AI689420, AW051088, AI633125, |
| | | | | | AI963846, AW051258, AI915291, |
| | | | | | AW152182, AI345477, AI866162, |
| | | | | | AI521560, AI889189, AI097410, |
| | | | | | AA872507, AI538764, AI866573, |
| | | | | | AI204298, AI801325, AI475377, |
| | | | | | AW089275, AI522052, AW238688, |
| | | | | | AI921281, AI499381, AI308032, |
| | | | | | AI349967, AI500662, AI473536, |
| | | | | | W74529, AI963346, AI344785, F27788, |
| | | | | | AL041772, AI888661, AI687689, |
| | | | | | AL121286, AI699011, AW071417, |
| | | | | | AI537515, AW083750, AI473554, |
| | | | | | AI860003, AI680453, AW129271, |
| | | | | | AL042628, AI174394, AW051226, |
| | | | | | AI784230, AI648473, AA494167, |
| | | | | | AL036403, AW163834, AL039086, |
| | | | | | AI358701, AL568138, AW162194, |
| | | | | | AI624293, AI636588, AW301754, |
| | | | | | AL037030, AI890223, AI857724, |
| | | | | | AI281782, AI567360, AW088899, |
| | | | | | AW148356, AI866741, AL038605, |
| | | | | | AL117551, L40459, AR012385, X72889, |
| | | | | | I89947, E03348, X96540, AL117432, |
| | | | | | A08913, AR059958, AR038854, A08916, |
| | | | | | AL133016, I48978, X93495, AR000496, |
| | | | | | U39656, U96683, U72620, A08910, |
| | | | | | A08909, AF008439, AL080060, |
| | | | | | AF061943, AF185576, AL137271, |
| | | | | | AL117585, A08912, I89931, AL117583, |
| | | | | | I49625, X63574, U67958, A65341, |
| | | | | | AL110280, S78214, AF026816, |
| | | | | | AF113019, AF100931, AJ012755, |
| | | | | | AL050149, AF090903, AL080159, |
| | | | | | L30117, AL137478, A77033, A77035, |
| | | | | | AF087943, Z82022, A93350, AF026124, |
| | | | | | AL137533, AL133560, I48979, |
| | | | | | AL117440, AF162270, Y07905, |
| | | | | | AL137292, AF113690, AF113689, |
| | | | | | L19437, E15569, AL080074, AJ238278, |
| | | | | | AL133557, U80742, AL050393, |
| | | | | | AF078844, AL049382, AF061795, |
| | | | | | AF151685, X65873, AF003737, |
| | | | | | AF067728, AL137550, I42402, X92070, |
| | | | | | AL110221, AF090900, AF081197, |
| | | | | | AF118094, AF153205, AL117460, |
| | | | | | AL122098, Y09972, AF125948, |
| | | | | | AF090901, A03736, AL122121, |
| | | | | | AL137476, X82434, AL050024, |
| | | | | | AL049430, AF113699, E02349, |
| | | | | | AF111849, AF125949, AF113676, |
| | | | | | AF177401, AF032666, AR011880, |
| | | | | | I26207, AL049466, AF183393, |
| | | | | | AL137538, AF158248, AL080137, |
| | | | | | I33392, U35846, AF079765, AJ006417, |
| | | | | | AF106862, AL122123, AL049938, |
| | | | | | AL133645, AL080127, AL137463, |
| | | | | | AF104032, AF091084, AL133067, |
| | | | | | AF090934, AF113677, I03321, Y11587, |
| | | | | | Y14314, AL023657, AL137480, A58524, |
| | | | | | A58523, AL122110, S75997, AL137556, |
| | | | | | AL133665, AL050116, AL122118, |
| | | | | | U78525, E12747, AL133072, AL080124, |
| | | | | | AF119337, U00763, Y16645, AL049300, |
| | | | | | AL049452, AL049283, AL110196, |
| | | | | | AJ000937, AL133080, AL137560, |
| | | | | | U58996, AJ242859, AL117457, E08631, |
| | | | | | A45787, AL050108, AF090896, |
| | | | | | AL133565, AL137521, AF111112, |
| | | | | | E04233, I00734, AL110222, AF017437, |
| | | | | | AL117435, Z72491, A08908, AF111851, |
| | | | | | AL050172, AL117578, AF113013, |
| | | | | | E00617, E00717, E00778, AL050277, |
| | | | | | AL133606, AF057300, AF057299, |
| | | | | | AF079763, AF113694, AL137526, |
| | | | | | E06743, AL137557, E05822, AL137459, |
| | | | | | Z37987, AL049464, S79832, AF139986, |
| | | | | | AF022363, AF081195, X53587, U49908, |
| | | | | | S61953, AR038969, AL133104, |
| | | | | | AF097996, A90832, Y11254, AL133640, |
| | | | | | AF210052, AF113691, AF146568, |
| | | | | | AL122093, AL050092, AL050138, |
| | | | | | U42766, E02221, AB019565, AL122049, |
| | | | | | AF090943, AF118064, I09360, |
| | | | | | AL133093, X87582, AF118070, |
| | | | | | AL122050, X70685, AL049314, M30514, |
| | | | | | AL137648, AL133098, X84990, |
| | | | | | AF017152, E07108, A07647, and |
| | | | | | L31396. |
| ITNSMB24 | 83 | 971537 | 1-671 | 15-685 | AI978874, AI469095, AP001623, |
| | | | | | AP001623, AC015555, and AC015555. |
| HLMDO77 | 84 | 974855 | 1-633 | 15-647 | AI302099, D80253, D59859, C14389, |
| | | | | | D80366, D51423, D57483, D80188, |
| | | | | | D80227, D59889, D59467, D80166, |
| | | | | | D59619, D80210, D51799, D80240, |
| | | | | | D80269, D80391, D81030, D59787, |
| | | | | | D58283, D80212, D80022, D59275, |
| | | | | | D80248, C14331, D80219, D80024, |
| | | | | | D80195, D80196, D80164, D80043, |
| | | | | | D59502, D80251, AA305409, D59610, |
| | | | | | C14014, AA305578, D81026, D80133, |
| | | | | | D80378, D80522, AA514186, C15076, |
| | | | | | D59927, D80038, D50979, D51022, |
| | | | | | D50995, D80193, D80045, AW177440, |
| | | | | | AA514188, D80241, D51060, |
| | | | | | AW360811, D80268, AW178893, |
| | | | | | C14429, AW377671, AW375405, |
| | | | | | D80439, C75259, D80302, T03269, |
| | | | | | AW179328, D80247, D58253, |
| | | | | | AW366296, AW360844, AW360817, |
| | | | | | AW375406, AW378534, AW179332, |
| | | | | | AW377672, AW179023, AW178905, |
| | | | | | AW178906, AW177501, C05695, |
| | | | | | AW177511, AW378532, D80134, |
| | | | | | D59373, AW352171, AW377676, |
| | | | | | AW177505, AW352170, AW177731, |
| | | | | | D80132, AW178907, AW178762, |
| | | | | | AW179019, AW179024, D51079, |
| | | | | | D80157, D51103, D51250, AW360841, |
| | | | | | AW179012, AW179020, AW178775, |
| | | | | | D51759, AW367967, AW178909, |
| | | | | | AW177456, AW369651, AW352117, |
| | | | | | AW179329, AW178980, AW177733, |
| | | | | | AW378528, AW178908, AW178754, |
| | | | | | AW179018, AW352158, AW176467, |
| | | | | | AW179004, AW178914, AW378525, |
| | | | | | D80949, AW178983, AW352163, |
| | | | | | F13647, AW352174, T11417, T48593, |
| | | | | | C14227, D45260, D80168, AI910186, |
| | | | | | D59653, AW179009, C06015, |
| | | | | | AW177728, A62298, AR018138, |
| | | | | | AR008278, A84916, A62300, AB028859, |
| | | | | | AJ132110, AF058696, A82595, X67155, |
| | | | | | Y17188, D26022, Y12724, A25909, |
| | | | | | A67220, D89785, A78862, D34614, |
| | | | | | A94995, AB002449, AR060385, |
| | | | | | AR008443, D88547, I50126, I50132, |
| | | | | | I50128, I50133, X82626, I82448, |
| | | | | | AR066488, AR016514, AR060138, |
| | | | | | A45456, A26615, AR052274, AR054175, |
| | | | | | AR025207, I14842, Y09669, A43192, |
| | | | | | A43190, AR038669, AR066487, |
| | | | | | AR066490, A30438, I18367, AR008277, |
| | | | | | AR008281, D50010, Y17187, A63261, |
| | | | | | X64588, AR008408, AB012117, |
| | | | | | AR062872, A70867, AR016691, |
| | | | | | AR016690, U46128, X68127, D13509, |
| | | | | | A64136, A68321, AR060133, I79511, |
| | | | | | A85396, D88507, AR066482, A44171, |
| | | | | | A85477, I19525, A86792, X93549, |
| | | | | | U79457, AF123263, AR032065, X72378, |
| | | | | | and AR008382. |

[0095] TABLE 4

| Code | Description | Tissue | Organ | Cell Line | Disease | Vector | |
|---|---|---|---|---|---|---|---|
| AR022 | a_Heart | a_Heart | | | | | |
| AR023 | a_Liver | a_Liver | | | | | |
| AR024 | a_mammary gland | a_mammary gland | | | | | |
| AR025 | a_Prostate | a_Prostate | | | | | |
| AR026 | a_small intestine | a_small intestine | | | | | |
| AR027 | a_Stomach | a_Stomach | | | | | |
| AR028 | Blood B cells | Blood B cells | | | | | |
| AR029 | Blood B cells activated | Blood B cells | | | | | |
| | | activated | | | | | |
| AR030 | Blood B cells resting | Blood B cells | | | | | |
| | | restin | | | | | |
| AR031 | Blood T cells activated | Blood T cells | | | | | |
| | | activated | | | | | |
| AR032 | Blood T cells resting | Blood T cells resting | | | | | |
| AR033 | brain | brain | | | | | |
| AR034 | breast | breast | | | | | |
| AR035 | breast cancer | breast cancer | | | | | |
| AR036 | Cell Line CAOV3 | Cell Line CAOV3 | | | | | |
| AR037 | cell line PA-1 | cell line PA-1 | | | | | |
| AR038 | cell line transformed | cell line transformed | | | | | |
| AR039 | colon | colon | | | | | |
| AR040 | colon (9808co65R) | colon (9808co65R) | | | | | |
| AR041 | colon (9809co15) | colon (9809co15) | | | | | |
| AR042 | colon cancer | colon cancer | | | | | |
| AR043 | colon cancer (9808co64R) | colon cancer | | | | | |
| | | (9808co64R) | | | | | |
| AR044 | colon cancer 9809co14 | colon cancer | | | | | |
| | | 9809co14 | | | | | |
| AR045 | corn clone 5 | corn clone 5 | | | | | |
| AR046 | corn clone 6 | corn clone 6 | | | | | |
| AR047 | corn clone2 | corn clone2 | | | | | |
| AR048 | corn clone3 | corn clone3 | | | | | |
| AR049 | Corn Clone4 | Corn Clone4 | | | | | |
| AR050 | Donor II B Cells 24 hrs | Donor II B Cells | | | | | |
| AR051 | Donor II B Cells 72 hrs | Donor II B Cells | | | | | |
| AR052 | Donor II B-Cells 24 hrs | Donor II B-Cells 24 | | | | | |
| AR053 | Donor II B-Cells 72 hrs | Donor II B-Cells | | | | | |
| AR054 | Donor II Resting B Cells | Donor II Resting B | | | | | |
| AR055 | Heart | Heart | | | | | |
| AR056 | Human Lung (clonetech) | Human Lung | | | | | |
| | | (clonetech) | | | | | |
| AR057 | Human Mammary | Human Mammary | | | | | |
| | (clontech) | (clontech) | | | | | |
| AR058 | Human Thymus | Human Thymus | | | | | |
| | (clonetech) | (clonetech) | | | | | |
| AR059 | Jurkat (unstimulated) | Jurkat | | | | | |
| | | (unstimulated) | | | | | |
| AR060 | Kidney | Kidney | | | | | |
| AR061 | Liver Liver | | | | | | |
| AR062 | Liver (Clontech) | Liver (Clontech) | | | | | |
| AR063 | Lymphocytes chronic | Lymphocytes | | | | | |
| | lymphocytic leukaemia | chronic lymphocytic | | | | | |
| | | leukaemia | | | | | |
| AR064 | Lymphocytes diffuse large | Lymphocytes | | | | | |
| | B cell lymphoma | diffuse large B cell | | | | | |
| | | lymphoma | | | | | |
| AR065 | Lymphocytes follicular | Lymphocytes | | | | | |
| | lymphoma | follicular lymphoma | | | | | |
| AR066 | normal breast | normal breast. | | | | | |
| AR067 | Normal Ovarian | Normal Ovarian | | | | | |
| | (4004901) | (4004901) | | | | | |
| AR068 | Normal Ovary 9508G045 | Normal Ovary | | | | | |
| | | 95080045 | | | | | |
| AR069 | Normal Ovary 9701G208 | Normal Ovary | | | | | |
| | | 9701G208 | | | | | |
| AR070 | Normal Ovary 9806G005 | Normal Ovary | | | | | |
| | | 98060005 | | | | | |
| AR071 | Ovanan Cancer | Ovarian Cancer | | | | | |
| AR072 | Ovarian Cancer | Ovarian Cancer | | | | | |
| | (9702G001) | (97020001) | | | | | |
| AR073 | Ovarian Cancer | Ovarian Cancer | | | | | |
| | (97070029) | (97070029) | | | | | |
| AR074 | Ovarian Cancer | Ovarian Cancer | | | | | |
| | (98040011) | (98040011) | | | | | |
| AR075 | Ovarian Cancer | Ovarian Cancer | | | | | |
| | (9806G019) | (98060019) | | | | | |
| AR076 | Ovarian Cancer | Ovarian Cancer | | | | | |
| | (9807G017) | (9807G017) | | | | | |
| AR077 | Ovarian Cancer | Ovarian Cancer | | | | | |
| | (98090001) | (98090001) | | | | | |
| AR078 | ovarian cancer 15799 | ovarian cancer | | | | | |
| | | 15799 | | | | | |
| AR079 | Ovarian Cancer | Ovarian Cancer | | | | | |
| | 17717A1D | 17717A1D | | | | | |
| AR080 | Ovarian Cancer | Ovarian Cancer | | | | | |
| | 4004664B1 | 4004664B1 | | | | | |
| AR081 | Ovarian Cancer | Ovarian Cancer | | | | | |
| | 4005315A1 | 4005315A1 | | | | | |
| AR082 | ovarian cancer 94127303 | ovarian cancer | | | | | |
| | | 94127303 | | | | | |
| AR083 | Ovarian Cancer 96069304 | Ovarian Cancer | | | | | |
| | | 96069304 | | | | | |
| AR084 | Ovarian Cancer 97070029 | Ovarian Cancer | | | | | |
| | | 97070029 | | | | | |
| AR085 | Ovarian Cancer 98070045 | Ovarian Cancer | | | | | |
| | | 98070045 | | | | | |
| AR086 | ovarian cancer 98090001 | ovarian cancer | | | | | |
| | | 98090001 | | | | | |
| AR087 | Ovarian Cancer | Ovarian Cancer | | | | | |
| | 9905C032RC | 9905C032RC | | | | | |
| AR088 | Ovarian cancer 9907 C00 | Ovarian cancer 9907 | | | | | |
| | 3rd | C00 3rd | | | | | |
| AR089 | Prostate | Prostate | | | | | |
| AR090 | Prostate (clonetech) | Prostate (clonetech) | | | | | |
| AR091 | prostate cancer | prostate cancer | | | | | |
| AR092 | prostate cancer #15176 | prostate cancer | | | | | |
| | | #15176 | | | | | |
| AR093 | prostate cancer #15509 | prostate cancer | | | | | |
| | | #15509 | | | | | |
| AR094 | prostate cancer #15673 | prostate cancer | | | | | |
| | | #15 673 | | | | | |
| AR095 | Small Intestine (Clontech) | Small Intestine | | | | | |
| | | (Clontech) | | | | | |
| AR096 | Spleen | Spleen | | | | | |
| AR097 | Thymus T cells activated | Thymus T cells | | | | | |
| | | activated | | | | | |
| AR098 | Thymus T cells resting | Thymus T cells | | | | | |
| | | resting | | | | | |
| AR099 | Tonsil | Tonsil | | | | | |
| AR100 | Tonsil geminal center | Tonsil geminal | | | | | |
| | centroblast | center centroblast | | | | | |
| AR101 | Tonsil germinal center B | Tonsil germinal | | | | | |
| | cell | center B cell | | | | | |
| AR102 | Tonsil lymph node | Tonsil lymph node | | | | | |
| AR103 | Tonsil memory B cell | Tonsil memory B | | | | | |
| | | cell | | | | | |
| AR104 | Whole Brain | Whole Brain | | | | | |
| AR105 | Xenograft ES-2 | Xenograft ES-2 | | | | | |
| AR106 | Xenograft SW626 | Xenograft SW626 | | | | | |
| H0004 | Human Adult Spleen | Human Adult | Spleen | | | Uni-ZAP XR | |
| | | Spleen | | | | | |
| H0009 | Human Fetal Brain | | | | | Uni-ZAP XR | |
| H0012 | Human Fetal Kidney | Human Fetal Kidney | Kidney | | | Uni-ZAP XR | |
| H0013 | Human 8 Week Whole | Human 8 Week Old | Embryo | | | Uni-ZAP XR | |
| | Embryo | Embryo | | | | | |
| H0014 | Human Gall Bladder | Human Gall Bladder | Gall Bladder | | | Uni-ZAP XR | |
| H0017 | Human Greater Omentum | Human Greater | peritoneum | | | Uni-ZAP XR | |
| | | Omentum | | | | | |
| H0024 | Human Fetal Lung III | Human Fetal Lung | Lung | | Uni-ZAP XR | | |
| H0026 | Namalwa Cells | Namalwa B-Cell | | | | Lambda ZAP | |
| | | Line, EBV | | | | II | |
| | | immortalized | | | | | |
| H0028 | Human Old Ovary | Human Old Ovary | Ovary | pBluescript | | | |
| H0030 | Human Placenta | | | | | Uni-ZAP XR | |
| H0031 | Human Placenta | Human Placenta | Placenta | | | Uni-ZAP XR | |
| H0032 | Human Prostate | Human Prostate | Prostate | | | Uni-ZAP XR | |
| H0036 | Human Adult Small | Human Adult Small | Small Int. | | | Uni-ZAP XR | |
| | Intestine | Intestine | | | | | |
| H0038 | Human Testes | Human Testes Testis | | | Uni-ZAP XR | | |
| H0039 | Human Pancreas Tumor | Human Pancreas | Pancreasdisease | | | Uni-ZAP XR | |
| | | Tumor | | | | | |
| H0040 | Human Testes Tumor | Human Testes | Testis | disease | | | Uni-ZAP XR |
| | | Tumor | | | | | |
| H0041 | Human Fetal Bone | Human Fetal Bone | Bone | | | Uni-ZAP XR | |
| H0042 | Human Adult Pulmonary | Human Adult | Lung | | | Uni-ZAP XR | |
| | | Pulmonary | | | | | |
| H0046 | Human Endometrial | Human Endometrial | Uterus | disease | | | Uni-ZAP XR |
| | | Tumor | Tumor | | | | |
| H0050 | Human Fetal Heart | Human Fetal Heart | Heart | | | Uni-ZAP XR | |
| H0051 | Human Hippocampus | Human | Brain | | | Uni-ZAP XR | |
| | | Hippocampus | | | | | |
| H0052 | Human Cerebellum | Human Cerebellum | Brain | | | Uni-ZAP XR | |
| H0056 | Human Umbilical Vein, | Human Umbilical | Umbilical | | | Uni-ZAP XR | |
| | Endo. remake | Vein Endothelial | vein | | | | |
| | | Cells | | | | | |
| H0057 | Human Fetal Spleen | | | | | Uni-ZAP XR | |
| H0059 | Human Uterine Cancer | Human Uterine | Uterus | | disease | Lambda ZAP | |
| | | Cancer | | | | II | |
| H0063 | Human Thymus | Human Thymus | Thymus | | | Uni-ZAP XR | |
| H0068 | Human Skin Tumor | Human Skin Tumor | Skin | disease | Uni-ZAP XR | | |
| H0069 | Human Activated T-Cells | Activated T-Cells | Blood | Cell Line | | Uni-ZAP XR | |
| H0071 | Human Infant Adrenal | Human Infant | Adrenal | | | Uni-ZAP XR | |
| | Gland | Adrenal Gland | gland | | | | |
| H0075 | Human Activated T-Cells | Activated T-Cells | Blood | Cell Line | | Uni-ZAP XR | |
| | | (II) | | | | | |
| H0081 | Human Fetal Epithelium | Human Fetal Skin | Skin | | | Uni-ZAP XR | |
| | (Skin) | | | | | | |
| H0083 | HUMAN JURKAT | Jurkat Cells | | | | Uni-ZAP XR | |
| | MEMBRANE BOUND | | | | | | |
| | POLYSOMES | | | | | | |
| H0086 | Human epithelioid | Epithelioid | Sk Muscle | | disease | Uni-ZAP XR | |
| | sarcoma | Sarcoma, muscle | | | | | |
| H0087 | Human Thymus | Human Thymus | | | | pBluescript | |
| H0090 | Human T-Cell Lymphoma | I-Cell Lymphoma | T-Cell | disease | | | Uni-ZAP XR |
| H0100 | Human Whole Six Week | Human Whole Six | Embryo | | | Uni-ZAP XR | |
| | Old Embryo | Week Old Embryo | | | | | |
| H0105 | Human Fetal Heart, | Human Fetal Heart | Heart | | | pBluescript | |
| | subtracted | | | | | | |
| H0122 | Human Adult Skeletal | Human Skeletal | Sk Muscle | | | Uni-ZAP XR | |
| | Muscle | Muscle | | | | | |
| H0123 | Human Fetal Dura Mater | Human Fetal Dura | Brain | | | Uni-ZAP XR | |
| | | Mater | | | | | |
| H0124 | Human | Human | Sk Muscle | | disease | Uni-ZAP XR | |
| | Rhabdomyosarcoma | Rhabdomyosarcoma | | | | | |
| H0125 | Cem cells cyclohexamide | Cyclohexamide | Blood Cell Line | | Uni-ZAP XR | | |
| | treated | Treated Cem, Jurkat, | | | | | |
| | | Raji, and Supt | | | | | |
| H0132 | LNCAP + 30 nM R1881 | LNCAP Cell Line | Prostate | Cell Line | | Uni-ZAP XR | |
| H0135 | Human Synovial Sarcoma | Human Synovial | Synovium | | | Uni-ZAP XR | |
| | | Sarcoma | | | | | |
| H0136 | Supt Cells, cyclohexamide | Cyclohexamide | Blood Cell Line | | Uni-ZAP XR | | |
| | treated | Treated Cem, Jurkat, | | | | | |
| | | Raji, and Supt | | | | | |
| H0144 | Nine Week Old Early | 9 Wk Old Early | Embryo | | | Uni-ZAP XR | |
| | Stage Human | Stage Human | | | | | |
| H0150 | Human Epididymus | Epididymis | Testis | | | Uni-ZAP XR | |
| H0156 | Human Adrenal Gland | Human Adrenal | Adrenal | disease | Uni-ZAP XR | | |
| | Tumor | Gland Tumor | Gland | | | | |
| H0163 | Human Synovium | Human Synovium | Synovium | | | Uni-ZAP XR | |
| H0166 | Human Prostate Cancer, | Human Prostate | Prostate | | disease | Uni-ZAP XR | |
| | Stage B2 fraction | Cancer, stage B2 | | | | | |
| H0169 | Human Prostate Cancer, | Human Prostate | Prostate | | disease | Uni-ZAP XR | |
| | Stage C fraction | Cancer, stage C | | | | | |
| H0170 | 12 Week Old Early Stage | Twelve Week Old | Embryo | | | Uni-ZAP XR | |
| | Human | Early Stage Human | | | | | |
| H0171 | 12 Week Old Early Stage | Twelve Week Old | Embryo | | | Uni-ZAP XR | |
| | Human, II | Early Stage Human | | | | | |
| H0181 | Human Primary Breast | Human Primary | Breast | | disease | Uni-ZAP XR | |
| | Cancer | Breast Cancer | | | | | |
| H0188 | Human Normal Breast | Human Normal | Breast | | | Uni-ZAP XR | |
| | | Breast | | | | | |
| H0194 | Human Cerebellum, | Human Cerebellum | Brain | | | pBluescript | |
| | subtracted | | | | | | |
| H0208 | Early Stage Human Lung, | Human Fetal Lung | Lung | | | pBluescript | |
| | subtracted | | | | | | |
| H0212 | Human Prostate, | Human Prostate | Prostate | | | pBluescript | |
| | subtracted | | | | | | |
| H0213 | Human Pituitary, | Human Pituitary | | | | Uni-ZAP XR | |
| | subtracted | | | | | | |
| H0218 | Activated T-Cells, 0 hrs, | Activated T-Cells | Blood Cell Line | | Uni-ZAP XR | | |
| | subtracted | | | | | | |
| H0222 | Activated T-Cells, 8 hrs, | Activated T-Cells | Blood Cell Line | | Uni-ZAP XR | | |
| | subtracted | | | | | | |
| H0231 | Human Colon, subtraction | Human Colon | | | | pBluescript | |
| H0239 | Human Kidney Tumor | Human Kidney | Kidney | | disease Uni-ZAP XR | | |
| | | Tumor | | | | | |
| H0244 | Human 8 Week Whole | Human 8 Week Old | Embryo | | | Uni-ZAP XR | |
| | Embryo, subtracted | Embryo | | | | | |
| H0251 | Human Chondrosarcoma | Human | Cartilage | | disease | Uni-ZAP XR | |
| | | Chondrosarcoma | | | | | |
| H0252 | Human Osteosarcoma | Human | Bone | | disease | Uni-ZAP XR | |
| | | Osteosarcoma | | | | | |
| H0255 | breast lymph node CDNA | Breast Lymph Node | Lymph Node | | | Lambda ZAP | |
| | library | | | | | II | |
| H0261 | H. cerebellum, Enzyme | Human Cerebellum | Brain | | | Uni-ZAP XR | |
| | subtracted | | | | | | |
| H0263 | human colon cancer | Human Colon | Colon | | disease | Lambda ZAP | |
| | | Cancer | | | | II | |
| H0264 | human tonsils | Human Tonsil | Tonsil | | Uni-ZAP XR | | |
| H0265 | Activated T-Cell | T-Cells | Blood | Cell Line | | Uni -ZAP XR | |
| | (12 hs)/Thiouridine | | | | | | |
| | labelledEco | | | | | | |
| H0266 | Human Microvascular | HMEC | Vein | Cell Line | | Lambda ZAP | |
| | Endothelial Cells, fract. A | | | | | II | |
| H0270 | HPAS (human pancreas, | Human Pancreas | Pancreas | | | Uni-ZAP XR | |
| | subtracted) | | | | | | |
| H0271 | Human Neutrophil, | Human Neutrophil - | Blood | Cell Line | | Uni-ZAP XR | |
| | Activated | Activated | | | | | |
| H0272 | HUMAN TONSILS, | Human Tonsil | Tonsil | | | Uni-ZAP XR | |
| | FRACTION 2 | | | | | | |
| H0284 | Human OB MG63 control | Human | Bone | Cell Line | | Uni-ZAP XR | |
| | fraction I | Osteoblastoma | | | | | |
| | | MG63 cell line | | | | | |
| H0288 | Human OB HOS control | Human | Bone Cell Line | | Uni-ZAP XR | | |
| | fraction O | Osteoblastoma HOS | | | | | |
| | | cell line | | | | | |
| H0292 | Human OB HOS treated | Human | Bone | Cell Line | | Uni-ZAP XR | |
| | (10 nM E2) fraction 1 | Osteoblastoma HOS | | | | | |
| | | cell line | | | | | |
| H0295 | Amniotic Cells - Primary | Amniotic Cells - | Placenta | Cell Line | | Uni-ZAP XR | |
| | Culture | Primary Culture | | | | | |
| H0305 | CD34 positive cells (Cord | CD34 Positive Cells | Cord Blood | | | ZAP Express | |
| | Blood) | | | | | | |
| H0306 | CD34 depleted Buffy Coat | CD34 Depleted | Cord Blood | | | ZAP Express | |
| | (Cord Blood) | Buffy Coat (Cord | | | | | |
| | | Blood) | | | | | |
| H0309 | Human Chronic Synovitis | Synovium, Chronic | Synovium | | disease | Uni-ZAP XR | |
| | | Synovitis/ | | | | | |
| | | Osteoarthritis | | | | | |
| H0310 | human caudate nucleus | Brain | Brain | | | Uni-ZAP XR | |
| H0316 | HUMAN STOMACH | Human Stomach | Stomach | | | Uni-ZAP XR | |
| H0318 | HUMAN B CELL | Human B Cell | Lymph Node | | disease | Uni-ZAP XR | |
| | LYMPH0MA | Lymphoma | | | | | |
| H0328 | human ovarian cancer | Ovarian Cancer | Ovary | | disease | Uni-ZAP XR | |
| H0329 | Dermatofibrosarcoma | Dermatofibrosarcoma | Skin | | disease | Uni-ZAP XR | |
| | Protuberance | Protuberans | | | | | |
| H0331 | Hepatocellular Tumor | Hepatocellular | Liver | | disease | Lambda ZAP | |
| | | Tumor | | | | II | |
| H0333 | Hemangiopericytoma | Hemangiopericytoma | Blood vessel | | disease | Lambda ZAP | |
| | | | | | | II | |
| H0341 | Bone Marrow Cell Line | Bone Marrow Cell | Bone Marrow | Cell Line | | Uni-ZAP XR | |
| | (R54;11) | Line R54;11 | | | | | |
| H0352 | wilm″s tumor | Wilm″s Tumor | | | disease | Uni -ZAP XR | |
| H0355 | Human Liver | Human Liver, | | | | pCMVSport 1 | |
| | | normal Adult | | | | | |
| H0369 | H. Atrophic Endometrium | Atrophic | | | | Uni-ZAP XR | |
| | | Endometrium and | | | | | |
| | | myometrium | | | | | |
| H0370 | H. Lymph node breast | Lymph node with | | | disease | Uni-ZAP XR | |
| | Cancer | Met. Breast Cancer | | | | | |
| H0373 | Human Heart | Human Adult Heart | Heart | | | pCMVSport 1 | |
| H0375 | Human Lung | Human Lung | | | | pCMVSport 1 | |
| H0380 | Human Tongue, frac 2 | Human Tongue | | | | pSport1 | |
| H0381 | Bone Cancer | Bone Cancer | | | disease | Uni-ZAP XR | |
| H0386 | Leukocyte and Lung; 4 | Human Leukocytes | Blood | Cell Line | | pCMVSport 1 | |
| | screens | | | | | | |
| H0392 | H. Meningima, M1 | Human Meningima | brain | | | pSport1 | |
| H0393 | Fetal Liver, subtraction II | Human Fetal Liver | Liver | | pBluescript | | |
| H0411 | H Female Bladder, Adult | Human Female | Bladder | | | pSport1 | |
| | | Adult Bladder | | | | | |
| H0412 | Human umbilical vein | HUVE Cells | Umbilical | Cell Line | | pSport1 | |
| | endothelial cells, IL-4 | | vein | | | | |
| | induced | | | | | | |
| H0413 | Human Umbilical Vein | HUVE Cells | Umbilical | Cell Line | | pSport1 | |
| | Endothelial Cells, | | vein | | | | |
| | uninduced | | | | | | |
| H0414 | Ovarian Tumor I, OV5232 | Ovarian Tumor, | Ovary | | disease | pSport1 | |
| | | OV5232 | | | | | |
| H0415 | H. Ovarian Tumor, II, | Ovarian Tumor, | Ovary | | disease | pCMVSport | |
| | OV5232 | OV5232 | | | | 2.0 | |
| H0418 | Human Pituitary, | Human Pituitary | | | | pBluescnpt | |
| | subtracted VII | | | | | | |
| H0422 | T-Cell PHA 16 hrs | T-Cells | Blood | Cell Line | pSport1 | | |
| H0423 | T-Cell PHA 24 hrs | T-Cells | Blood | Cell Line | pSport1 | | |
| H0424 | Human Pituitary, subt IX | Human Pituitary | | | | pBluescript | |
| H0427 | Human Adipose | Human Adipose, left | | | | pSport1 | |
| | | hiplipoma | | | | | |
| H0428 | Human Ovary | Human Ovary | Ovary | | | pSport1 | |
| | | Tumor | | | | | |
| H0429 | K562 + PMA (36 hrs),re- | K562 Cell line | cell line | Cell Line | | ZAP Express | |
| | excision | | | | | | |
| H0431 | H. Kidney Medulla, re- | Kidney medulla | Kidney | | | pBluescript | |
| | excision | | | | | | |
| H0434 | Human Brain, striatum, | Human Brain, | | | | pBluescript | |
| | re-excision | Striatum | | | | | |
| H0435 | Ovarian Tumor 10-3-95 | Ovarian Tumor, | Ovary | | | pCMVSport | |
| | | OV350721 | | | | 2.0 | |
| H0438 | H. Whole Brain #2, re- | Human Whole Brain | | | | ZAP Express | |
| | excision | #2 | | | | | |
| H0439 | Human Bosinophils | Eosinophils | | | | pBluescript | |
| H0441 | H. Kidney Cortex, | Kidney cortex | Kidney | | | pBluescript | |
| | subtracted | | | | | | |
| H0444 | Spleen metastic melanoma | Spleen, Metastic | Spleen | | disease | pSport1 | |
| | | malignant | | | | | |
| | | melanoma | | | | | |
| H0445 | Spleen, Chronic | Human Spleen, CLL | Spleen | disease | pSport1 | | |
| | lymphocytic leukemia | | | | | | |
| H0455 | H. Striatum Depression, | Human Brain, | Brain | | | pBluescript | |
| | subt | Striatum Depression | | | | | |
| H0457 | Human Eosinophils | Human Eosinophils | | | | pSport1 | |
| H0477 | Human Tonsil, Lib 3 | Human Tonsil | Tonsil | | | pSport1 | |
| H0478 | Salivary Gland, Lib 2 | Human Salivary | Salivary | | | pSport1 | |
| | | Gland | gland | | | | |
| H0483 | Breast Cancer cell line, | Breast Cancer Cell | | | | pSport1 | |
| | MDA 36 | line, MDA 36 | | | | | |
| H0486 | Hodgkin's Lymphoma II | Hodgkin's | | | disease | pCMVSport | |
| | | Lymphoma II | | | | 2.0 | |
| H0494 | Keratinocyte | Keratinocyte | | | | pCMVSport | |
| | | | | | | 2.0 | |
| H0497 | HEL cell line | HEL cell line | | HEL | | pSport1 | |
| | | | | 92.1.7 | | | |
| H0506 | Ulcerative Colitis | Colon | Colon | | pSport1 | | |
| H0509 | Liver, Hepatoma | Human Liver, | Liver | | disease | pCMVSport | |
| | | Hepatoma, patient 8 | | | 3.0 | | |
| H0510 | Human Liver, normal | Human Liver, | Liver | | | pCMVSport | |
| | | normal, Patient #8 | | | | 3.0 | |
| H0518 | pBMC stimulated w/ poly | pBMC stimulated | | | | pCMVSport | |
| | I/C | with poly I/C | | | 3.0 | | |
| H0519 | NTERA2, control | NTERA2, | | | | pCMVSport | |
| | | Teratocarcinoma | | | | 3.0 | |
| | | cell line | | | | | |
| H0520 | NTERA2 + retinoic acid, | NTERA2, | | | | pSport1 | |
| | 14 days | Teratocarcinoma | | | | | |
| | | cell line | | | | | |
| H0521 | Primary Dendritic Cells, | Primary Dendritic | | | | pCMVSport | |
| | lib 1 | cells | | | | 3.0 | |
| H0522 | Primary Dendritic | Primary Dendritic | | | | pCMVSport | |
| | cells,frac 2 | cells | | | | 3.0 | |
| H0529 | Myoloid Progenitor Cell | TF-1 Cell Line; | | | | pCMVSport | |
| | Line | Myoloid progenitor | | | | 3.0 | |
| | | cell line | | | | | |
| H0535 | Human ovary tumor cell | Ovarian Tumor, | Ovary | | disease | pSport1 | |
| | OV350721 | OV350721 | | | | | |
| H0538 | Merkel Cells | Merkel cells | Lymph node | | | pSport1 | |
| H0539 | Pancreas Islet Cell Tumor | Pancreas Islet Cell | Pancreas | | disease | pSport1 | |
| | | Tumour | | | | | |
| H0542 | T Cell helper I | Helper T cell | | | | pCMVSport | |
| | | | | | | 3.0 | |
| H0543 | T cell helper II | Helper T cell | | | | pCMVSport | |
| | | | | | | 3.0 | |
| H0544 | Human endometrial | Human endometrial | | | | pCMVSport | |
| | stromal cells | stromal cells | | | | 3.0 | |
| H0545 | Human endometrial | Human endometrial | | | | pCMVSport | |
| | stromal cells-treated with | stromal cells-treated | | | | 3.0 | |
| | progesterone | with proge | | | | | |
| H0546 | Human endometrial | Human endometrial | | | | pCMVSport | |
| | stromal cells-treated with | stromal cells-treated | | | | 3.0 | |
| | estradiol | with estra | | | | | |
| H0547 | NTERA2 teratocarcinoma | NTERA2, | | | | pSport1 | |
| | cell line + retinoic acid (14 | Teratocarcinoma | | | | | |
| | days) | cell line | | | | | |
| H0549 | H. Epididiymus, caput & | Human | | | | Uni-ZAP XR | |
| | corpus | Epididiymus, caput | | | | | |
| | | and corpus | | | | | |
| H0550 | H. Epididiymus, cauda | Human | | | | Uni-ZAP XR | |
| | | Epididiymus, cauda | | | | | |
| H0551 | Human Thymus Stromal | Human Thymus | | | | pCMVSport | |
| | Cells | Stromal Cells | | | | 3.0 | |
| H0553 | Human Placenta | Human Placenta | | | | pCMVSport | |
| | | | | | | 3.0 | |
| H0555 | Rejected Kidney, lib 4 | Human Rejected | Kidney | | disease | pCMVSport | |
| | | Kidney | | | | 3.0 | |
| H0556 | Activated T- | T-Cells | Blood | Cell Line | | Uni-ZAP XR | |
| | cell(12 h)/Thiouridine-re- | | | | | | |
| | excision | | | | | | |
| H0559 | HL-60, PMA 4H, re- | HL-60 Cells, PMA | Blood | Cell Line | | Uni-ZAP XR | |
| | excision | stimulated 4H | | | | | |
| H0560 | KMH2 | KMH2 | | | | pCMVSport | |
| | | | | | | 3.0 | |
| H0561 | L428 | L428 | | | | pCMVSport | |
| | | | | | | 3.0 | |
| H0562 | Human Fetal Brain, | Human Fetal Brain | | | | pCMVSport | |
| | normalized c5-11-26 | | | | | 2.0 | |
| H0569 | Human Fetal Brain, | Human Fetal Brain | | | | pCMVSport | |
| | normalized CO | | | | 2.0 | | |
| H0574 | Hepatocellular Tumor; re- | Hepatocellular | Liver | | disease | Lambda ZAP | |
| | excision | Tumor | | | | II | |
| H0575 | Human Adult | Human Adult | Lung | | | Uni-ZAP XR | |
| | Pulmonary ;re-excision | Pulmonary | | | | | |
| H0576 | Resting T-Cell; re- | T-Cells | Blood | Cell Line | | Lambda ZAP | |
| | excision | | | | | II | |
| H0578 | Human Fetal Thymus | Fetal Thymus | Thymus | | pSport1 | | |
| H0580 | Dendritic cells, pooled | Pooled dendritic | | | | pCMVSport | |
| | | cells | | | | 3.0 | |
| H0581 | Human Bone Marrow, | Human Bone | Bone Marrow | | | pCMVSport | |
| | treated | Marrow | | | 3.0 | | |
| H0586 | Healing groin wound, 6.5 | healing groin | groin | | disease | pCMVSport | |
| | hours post incision | wound, 65 hours | | | | 3.0 | |
| | | post incision - 2/ | | | | | |
| H0587 | Healing groin wound; 7.5 | Groin-2/19/97 groin | | disease | pCMVSport | | |
| | hours post incision | | | | | 3.0 | |
| H0590 | Human adult small | Human Adult Small | Small Int. | | | Uni-ZAP XR | |
| | intestine,re-excision | Intestine | | | | | |
| H0591 | Human T-cell | T-Cell Lymphoma | T-Cell | | disease | Uni-ZAP XR | |
| | lymphoma;re-excision | | | | | | |
| H0592 | Healing groin wound - | HGS wound healing | | | disease | pCMVSport | |
| | zero hr post-incision | project; abdomen | | | | 3.0 | |
| | (control) | | | | | | |
| H0593 | Olfactory | Olfactory epithelium | | | | pCMVSport | |
| | epithelium;nasalcavity | from roof of left | | | | 3.0 | |
| | | nasal cacit | | | | | |
| H0596 | Human Colon Cancer;re- | Human Colon | Colon | | | Lambda ZAP | |
| | excision | Cancer | | | | II | |
| H0597 | Human Colon; re-excision | Human Colon | | | | Lambda ZAP | |
| | | | | | | II | |
| H0598 | Human Stomach;re- | Human Stomach | Stomach | | | Uni-ZAP XR | |
| | excision | | | | | | |
| H0599 | Human Adult Heart;re- | Human Adult Heart | Heart | | | Uni-ZAP XR | |
| | excision | | | | | | |
| H0604 | Human Pituitary, re- | Human Pituitary | | | | pBluescript | |
| | excision | | | | | | |
| H0610 | H. Leukocytes, | H.Leukocytes | | | | pCMVSport 1 | |
| | normalized cot 5A | | | | | | |
| H0615 | Human Ovarian Cancer | Ovarian Cancer | Ovary | | disease | Uni-ZAP XR | |
| | Reexcision | | | | | | |
| H0616 | Human Testes, Reexcision | Human Testes | Testis | | | Uni-ZAP XR | |
| H0617 | Human Primary Breast | Human Primary | Breast | | disease | Uni-ZAP XR | |
| | Cancer Reexcision | Breast Cancer | | | | | |
| H0618 | Human Adult Testes, | Human Adult Testis | Testis | | | Uni-ZAP XR | |
| | Large Inserts, Reexcision | | | | | | |
| H0619 | Fetal Heart | Human Fetal Heart | Heart | | Uni-ZAP XR | | |
| H0620 | Human Fetal Kidney; | Human Fetal Kidney | Kidney | | | Uni-ZAP XR | |
| | Reexcision | | | | | | |
| H0622 | Human Pancreas Tumor; | Human Pancreas | Pancreas | disease | | | Uni-ZAP XR |
| | Reexcision | Tumor | | | | | |
| H0623 | Human Umbilical Vein; | Human Umbilical | Umbilical | | | Uni-ZAP XR | |
| | Reexcision | Vein Endothelial | vein | | | | |
| | | Cells | | | | | |
| H0624 | 12 Week Early Stage | Twelve Week Old | Embryo | | | Uni-ZAP XR | |
| | Human II; Reexcision | Early Stage Human | | | | | |
| H0625 | Ku 812F Basophils Line | Ku 812F Basophils | | | | pSport1 | |
| H0626 | Saos2 Cells; Untreated | Saos2 Cell Line; | | | | pSport1 | |
| | | Untreated | | | | | |
| H0628 | Human Pre-Differentiated | Human Pre- | | | | Uni-ZAP XR | |
| | Adipocytes | Differentiated | | | | | |
| | | Adipocytes | | | | | |
| H0631 | Saos2, Dexamethosome | Saos2 Cell Line; | | | | pSport1 | |
| | Treated | Dexamethosome | | | | | |
| | | Treated | | | | | |
| H0632 | Hepatocellular Tumor;re- | Hepatocellular | Liver | | | Lambda ZAP | |
| | excision | Tumor | | | | II | |
| H0633 | Lung Carcinoma A549 | TNFalpha activated | | | disease | pSport1 | |
| | TNFalpha activated | A549--Lung | | | | | |
| | | Carcinoma | | | | | |
| H0634 | Human Testes Tumor, re- | Human Testes | Testis | | disease | Uni-ZAP XR | |
| | excision | Tumor | | | | | |
| H0635 | Human Activated T-Cells, | Activated T-Cells | Blood Cell Line | | Uni-ZAP XR | | |
| | re-excision | | | | | | |
| H0636 | Chondrocytes | Chondrocytes | | | | pSport1 | |
| H0638 | CD40 activated monocyte | CD40 activated | | | | pSport1 | |
| | dendridic cells | monocyte dendridic | | | | | |
| | | cells | | | | | |
| H0641 | LPS activated derived | LPS activated | | | | pSport1 | |
| | dendritic cells | monocyte derived | | | | | |
| | | dendritic_cells | | | | | |
| H0643 | Hep G2 Cells, PCR library | Hep G2 Cells | | | | Other | |
| H0644 | Human Placenta (re- | Human Placenta | Placenta | | | Uni-ZAP XR | |
| | excision) | | | | | | |
| H0645 | Fetal Heart, re-excision | Human Fetal Heart | Heart | | | Uni-ZAP XR | |
| H0646 | Lung, Cancer (4005313 | Metastatic | | | | pSport1 | |
| | A3): Invasive Poorly | squamous cell lung | | | | | |
| | Differentiated Lung | carcinoma, poorly di | | | | | |
| | Adenocarcinoma, | | | | | | |
| H0647 | Lung, Cancer (4005163 | Invasive poorly | | | disease | pSport1 | |
| | B7): Invasive, Poorly Diff. | differentiated lung | | | | | |
| | Adenocarcinoma, | adenocarcinoma | | | | | |
| | Metastatic | | | | | | |
| H0648 | Ovary, Cancer: (4004562 | Papillary Cstic | | | disease | pSport1 | |
| | B6) Papillary Serous | neoplasm of low | | | | | |
| | Cystic Neoplasm, Low | malignant potentia | | | | | |
| | Malignant Pot | | | | | | |
| H0649 | Lung, Normal: (4005313 | Normal Lung | | | | pSport1 | |
| | B1) | | | | | | |
| H0650 | B-Cells | B-Cells | | | | pCMVSport | |
| | | | | | | 3.0 | |
| H0651 | Ovary, Normal: | Normal Ovary | | | | pSport1 | |
| | (9805C040R) | | | | | | |
| H0652 | Lung, Normal: (4005313 | Normal Lung | | | | pSport1 | |
| | B1) | | | | | | |
| H0656 | B-cells (unstimulated) | B-cells | | | | pSport1 | |
| | | (unstimulated) | | | | | |
| H0657 | B-cells (stimulated) | B-cells (stimulated) | | | | pSport1 | |
| H0658 | Ovary, Cancer | 9809C332-Poorly | Ovary & | | disease | pSport1 | |
| | (9809C332): Poorly | differentiate | Fallopian | | | | |
| | differentiated | | Tubes | | | | |
| | adenocarcinoma | | | | | | |
| H0659 | Ovary, Cancer | Grade II Papillary | Ovary | | disease | pSport1 | |
| | (15395A1F): Grade II | Carcinoma, Ovary | | | | | |
| | Papillary Carcinoma | | | | | | |
| H0660 | Ovary, Cancer: | Poorly differentiated | | | disease | pSport1 | |
| | (15799A1F) Poorly | carcinoma, ovary | | | | | |
| | differentiated carcinoma | | | | | | |
| H0661 | Breast, Cancer: (4004943 | Breast cancer | | | disease | pSport1 | |
| | A5) | | | | | | |
| H0662 | Breast, Normal: | Normal Breast - | Breast | | | pSport1 | |
| | (4005522B2) | #4005522(B2) | | | | | |
| H0663 | Breast, Cancer: (4005522 | Breast Cancer - | Breast | disease | pSport1 | | |
| | A2) | #4005522(A2) | | | | | |
| H0664 | Breast, Cancer: | Breast Cancer | Breast | disease | pSport1 | | |
| | (9806C012R) | | | | | | |
| H0665 | Stromal cells 3.88 | Stromal cells 3.88 | | | | pSport1 | |
| H0667 | Stromal cells(HBM3.18) | Stromal cell(HBM | | | | pSport1 | |
| | | 3.18) | | | | | |
| H0669 | Breast, Cancer: (4005385 | Breast Cancer | Breast | | | pSport1 | |
| | A2) | (4005385A2) | | | | | |
| H0670 | Ovary, Cancer(4004650 | Ovarian Cancer - | | | | pSport1 | |
| | A3): Well-Differentiated | 4004650A3 | | | | | |
| | Micropapillary Serous | | | | | | |
| | Carcinoma | | | | | | |
| H0672 | Ovary, Cancer: (4004576 | Ovarian | Ovary | | | pSport1 | |
| | A8) | Cancer(4004576A8) | | | | | |
| H0673 | Human Prostate Cancer, | Human Prostate | Prostate | | | Uni-ZAP XR | |
| | Stage B2; re-excision | Cancer, stage B2 | | | | | |
| H0674 | Human Prostate Cancer, | Human Prostate | Prostate | | | Uni-ZAP XR | |
| | Stage C; re-excission | Cancer, stage C | | | | | |
| H0675 | Colon, Cancer: | Colon Cancer | | | | pCMVSport | |
| | (9808C064R) | 9808C064R | | | | 3.0 | |
| H0677 | TNFR degenerate oligo | B-Cells | | | | PCRII | |
| H0682 | Serous Papillary | serous papillary | | | | pCMVSport | |
| | Adenocarcinoma | adenocarcinoma | | | | 3.0 | |
| | | (9606G3045PA3B) | | | | | |
| H0683 | Ovarian Serous Papillary | Serous papillary | | | | pCMVSport | |
| | Adenocarcinoma | adenocarcinoma, | | | | 3.0 | |
| | | stage 3C (9804G01 | | | | | |
| H0684 | Serous Papillary | Ovarian Cancer- | Ovaries | | | pCMVSport | |
| | Adenocarcinoma | 9810G606 | | | | 3.0 | |
| H0686 | Adenocarcinoma of | Adenocarcinoma of | | | | pCMVSport | |
| | Ovary, Human Cell Line | Ovary, Human Cell | | | | 3.0 | |
| | | Line, #SW-626 | | | | | |
| H0687 | Human normal | Human normal | Ovary | | | pCMVSport | |
| | ovary(#9610G215) | ovary(#9610G215) | | | | 3.0 | |
| H0689 | Ovarian Cancer Ovarian Cancer, | | | | pCMVSport | | |
| | | #9806G019 | | | 3.0 | | |
| H0690 | Ovarian Cancer, #Ovarian Cancer, | | | | pCMVSport | | |
| | 9702G001 | #9702G001 | | | | 3.0 | |
| H0694 | Prostate gland | Prostate gland, | prostate | | | pCMVSport | |
| | adenocarcinoma | adenocarcinoma, | gland | | | 3.0 | |
| | | mod/diff, gleason | | | | | |
| H0695 | mononucleocytes from | mononucleocytes | | | | pCMVSport | |
| | patient | from patient at | | | | 3.0 | |
| | Shady Grove Hospit | | | | | | |
| S0002 | Monocyte activated | Monocyte-activated | blood | Cell Line | Uni-ZAP XR | | |
| S0003 | Human Osteoclastoma | Osteoclastoma | bone | | disease | Uni-ZAP XR | |
| S0007 | Early Stage Human Brain | Human Fetal Brain | | | | Uni-ZAP XR | |
| S0010 | Human Amygdala | Amygdala | | | | Uni-ZAP XR | |
| S0024 | Human Kidney Medulla - | Human Kidney | | | | | |
| | unamplified | Medulla | | | | | |
| S0026 | Stromal cell TF274 | stromal cell | Bone marrow | Cell Line | Uni-ZAP XR | | |
| S0027 | Smooth muscle, serum | Smooth muscle | Pulmanary | Cell Line | | Uni-ZAP XR | |
| | treated | | artery | | | | |
| S0028 | Smooth muscle,control | Smooth muscle | Pulmanary | Cell Line | | Uni-ZAP XR | |
| | | | artery | | | | |
| S0031 | Spinal cord | Spinal cord | spinal cord | | | Uni-ZAP XR | |
| S0036 | Human Substantia Nigra | Human Substantia | | | | Uni -ZAP XR | |
| | | Nigra | | | | | |
| S0037 | Smooth muscle, IL1b | Smooth muscle | Pulmanary | Cell Line | | Uni-ZAP XR | |
| | induced | | artery | | | | |
| S0038 | Human Whole Brain #2 - | Human Whole Brain | | | | ZAP Express | |
| | Oligo dT > 1.5 Kb | #2 | | | | | |
| S0040 | Adipocytes | Human Adipocytes | | | | Uni-ZAP XR | |
| | | from Osteoclastoma | | | | | |
| S0042 | Testes | Human Testes | | | | ZAP Express | |
| S0044 | Prostate BPH | prostate BPH | Prostate | | disease | Uni-ZAP XR | |
| S0045 | Endothelial cells-control | Endothelial cell | endothelial | Cell Line | | Uni-ZAP XR | |
| | | | cell-lung | | | | |
| S0046 | Endothelial-induced | Endothelial cell | endothelial | Cell Line | | Uni-ZAP XR | |
| | | | cell-lung | | | | |
| S0049 | Human Brain, Striatum | Human Brain, | | | | Uni-ZAP XR | |
| | | Striatum | | | | | |
| S0050 | Human Frontal Cortex, | Human Frontal | | | disease | Uni-ZAP XR | |
| | Schizophrenia | Cortex, | | | | | |
| | | Schizophrenia | | | | | |
| S0051 | Human | Human | | | disease | Uni -ZAP XR | |
| | Hypothalmus,Schizophrenia | Hypothalamus, | | | | | |
| | | Schizophrenia | | | | | |
| S0052 | neutrophils control | human neutrophils | blood | Cell Line | | Uni-ZAP XR | |
| S0053 | Neutrophils IL-1 and LPS | human neutrophil | blood | Cell Line | | Uni-ZAP XR | |
| | induced | induced | | | | | |
| S0110 | Brain Amygdala | | Brain | | disease | Uni -ZAP XR | |
| | Depression | | | | | | |
| S0112 | Hypothainmus | | Brain | | | Uni -ZAP XR | |
| S0114 | Anergic T-cell | Anergic T-cell | | Cell Line | | Uni -ZAP XR | |
| S0116 | Bone marrow | Bone marrowBone marrow | | | Uni-ZAP XR | | |
| S0126 | Osteoblasts | Osteoblasts | KneeCell Line | | | Uni-ZAP XR | |
| S0132 | Epithelial-TNFa and INF | Airway Epithelial | | | | Uni-ZAP XR | |
| | induced | | | | | | |
| S0134 | Apoptotic T-cell | apoptotic cells | | Cell Line | | Uni-ZAP XR | |
| S0142 | Macrophage-oxLDL | macrophage- | blood | Cell Line | | Uni-ZAP XR | |
| | | oxidized LDL | | | | | |
| | | treated | | | | | |
| S0144 | Macrophage (GM-CSF | Macrophage (GM- | | | | Uni-ZAP XR | |
| | treated) | CSF treated) | | | | | |
| S0146 | prostate-edited | prostate BPH | Prostate | | | Uni-ZAP XR | |
| S0150 | LNCAP prostate cell line | LNCAP Cell Line | Prostate | Cell Line | | Uni-ZAP XR | |
| S0152 | PC3 Prostate cell line | PC3 prostate cell | | | | Uni -ZAP XR | |
| | | line | | | | | |
| S0192 | Synovial Fibroblasts | Synovial Fibroblasts | | | | pSport1 | |
| | (control) | | | | | | |
| S0194 | Synovial hypoxia | Synovial Fibroblasts | | | | pSport1 | |
| S0196 | Synovial IL-1/TNF Synovial Fibroblasts | | | | pSport1 | | |
| | stimulated | | | | | | |
| S0206 | Smooth Muscle- | HASTE | Smooth muscle | Pulmanary | Cell Line | | pBluescript |
| | normalized | | artery | | | | |
| S0210 | Messangial cell, frac 2 | Messangial cell | | | | pSport1 | |
| S0212 | Bone Marrow Stromal | Bone Marrow | | | | pSport1 | |
| | Cell, untreated | Stromal | | | | | |
| | | Cell,untreated | | | | | |
| S0214 | Human Osteoclastoma, re- | Osteoclastoma | bone | | disease | Uni-ZAP XR | |
| | excision | | | | | | |
| S0216 | Neutrophils IL-1 and LPS | human neutrophil | blood | Cell Line | | Uni-ZAP XR | |
| | induced | induced | | | | | |
| S0222 | H. Frontal | H. Brain, Frontal | Brain | | disease | Uni-ZAP XR | |
| | cortex,epileptic;re- | Cortex, Epileptic | | | | | |
| | excision | | | | | | |
| S0242 | Synovial Fibroblasts | Synovial Fibroblasts | | | | pSport1 | |
| | (II1/TNF), subt | | | | | | |
| S0250 | Human Osteoblasts II | Human Osteoblasts | Femur | | disease | pCMVSport | |
| | | | | | | 2.0 | |
| S0260 | Spinal Cord, re-excision | Spinal cord | spinal cord | | | Uni-ZAP XR | |
| S0276 | Synovial hypoxia-RSF | Synovial fobroblasts | Synovial | | | pSport1 | |
| | subtracted | (rheumatoid) | tissue | | | | |
| S0278 | H Macrophage (GM-CSF | Macrophage (GM- | | | | Uni-ZAP XR | |
| | treated), re-excision | CSF treated) | | | | | |
| S0280 | Human Adipose Tissue, | Human Adipose | | | | Uni-ZAP XR | |
| | re-excision | Tissue | | | | | |
| S0282 | Brain Frontal Cortex, re- | Brain frontal cortex | Brain | | | Lambda ZAP | |
| | excision | | | | | II | |
| S0294 | Larynx tumor | Larynx tumor | Larynx,vocal | | disease | pSport1 | |
| | | | cord | | | | |
| S0300 | Frontal lobe,dementia;re- | Frontal Lobe | Brain | | | Uni-ZAP XR | |
| | excision | dementia/Alzheimer's | | | | | |
| S0328 | Palate carcinoma | Palate carcinoma | Uvula | | disease | pSport1 | |
| S0330 | Palate normal | Palate normal | Uvula | | | pSport1 | |
| S0332 | Pharynx carcinoma | Pharynx carcinoma | Hypopharynx | | | pSport1 | |
| S0338 | Human Osteoarthritic | Human | | | disease | pSport1 | |
| | Cartilage Fraction III | osteoarthritic | | | | | |
| | | cartilage | | | | | |
| S0340 | Human Osteoarthritic | Human | | | disease | pSport1 | |
| | Cartilage Fraction IV | osteoarthritic | | | | | |
| | | cartilage | | | | | |
| S0346 | Human Amygdala;re- | Amygdala | | | | Uni-ZAP XR | |
| | excision | | | | | | |
| S0354 | Colon Normal II | Colon Normal | Colon | | | pSport1 | |
| S0356 | Colon Carcinoma | Colon Carcinoma | Colon | | disease | pSport1 | |
| S0358 | Colon Normal III | Colon Normal | Colon | | | pSport1 | |
| S0360 | Colon Tumor II | Colon Tumor | Colon | | disease | pSport1 | |
| S0362 | Human Gastrocnemius | Gastrocnemius | | | | pSport1 | |
| | | muscle | | | | | |
| S0364 | Human Quadriceps | Quadriceps muscle | | | | pSport1 | |
| S0366 | Human Solcus | Soleus Muscle | | | | pSport1 | |
| S0374 | Normal colon | Normal colon | | | | pSport1 | |
| S0376 | Colon Tumor | Colon Tumor | | | disease | pSport1 | |
| S0378 | Pancreas normal PCA4 | Pancreas Normal | | | | pSport1 | |
| | No | PCA4No | | | | | |
| S0380 | Pancreas Tumor PCA4 Tu | Pancreas Tumor | | | disease | pSport1 | |
| | | PCA4Tu | | | | | |
| S0386 | Human Whole Brain, re- | Whole brain | Brain | | | ZAP Express | |
| | excision | | | | | | |
| S0388 | Human | Human | | | disease | Uni-ZAP XR | |
| | Hypothalamus,schizophre | Hypothalamus, | | | | | |
| | nia, re-excision | Schizophrenia | | | | | |
| S0390 | Smooth muscle, control; | Smooth muscle | Pulmanary | Cell Line | | Uni-ZAP XR | |
| | re-excision | artery | | | | | |
| S0400 | Brain; normal | Brain; normal | | | | pSport1 | |
| S0408 | Colon, normal | Colon, normal | | | | pSport1 | |
| S0412 | Temporal cortex- | Temporal cortex, | | | disease | Other | |
| | Alzheizmer; subtracted | alzheimer | | | | | |
| S0418 | CHME Cell Line;treated 5 | CHME Cell Line; | | | | pCMVSport | |
| | hrs | treated | | | | 3.0 | |
| S0420 | CHME Cell | CHME Cell line, | | | | pSport1 | |
| | Line,untreated | untreatetd | | | | | |
| S0422 | Mo7e Cell Line GM-CSF | Mo7e Cell Line | | | | pCMVSport | |
| | treated (1 ng/ml) | GM-CSF treated | | | | 3.0 | |
| | | (1 ng/ml) | | | | | |
| S0424 | TF-1 Cell Line GM-CSF | TF-1 Cell Line | | | | pSport1 | |
| | Treated | GM-CSF Treated | | | | | |
| S0430 | Aryepiglottis Normal | Aryepiglottis | | | | pSport1 | |
| | | Normal | | | | | |
| S0434 | Stomach Normal | Stomach Normal | | | disease | pSport1 | |
| S0436 | Stomach Tumour | Stomach Tumour | | | disease | pSport1 | |
| S0450 | Larynx Tumour | Larynx Tumour | | | | pSport1 | |
| S0468 | Ea.hy.926 cell line | Ea.hy.926 cell line | | | | pSport1 | |
| S0472 | Lung Mesothelium | PYBT | | | | pSport1 | |
| S3012 | Smooth Muscle Serum | Smooth muscle | Pulmanary | Cell Line | | pBluescript | |
| | Treated, Norm | | artery | | | | |
| S3014 | Smooth muscle, serum | Smooth muscle | Pulmanary | Cell Line | | pBluescript | |
| | induced,re-exc | | artery | | | | |
| S6016 | H. Frontal Cortex, | H. Brain, Frontal | Brain | disease | Uni-ZAP XR | | |
| | Epileptic | Cortex, Epileptic | | | | | |
| S6022 | H. Adipose Tissue | Human Adipose | | | | Uni-ZAP XR | |
| | | Tissue | | | | | |
| S6024 | Alzheimers, spongy | Alzheimer's/Spongy Brain | disease | Uni-ZAP XR | | | |
| | change | change | | | | | |
| S6026 | Frontal Lobe, Dementia | Frontal Lobe | Brain | | | Uni-ZAP XR | |
| | | dementia/Alzheimer's | | | | | |
| S6028 | Human Manic Depression | Human Manic | Brain | | disease | Uni-ZAP XR | |
| | Tissue | depression tissue | | | | | |
| T0002 | Activated T-cells | Activated T-Cell, | Blood | Cell Line | | pBluescript | |
| | | PBL fraction | | | | SK- | |
| T0003 | Human Fetal Lung | Human Fetal Lung | | | | pBluescript | |
| | | | | | | SK- | |
| T0006 | Human Pineal Gland | Human Pinneal | | | | pEluescript | |
| | | Gland SK- | | | | | |
| T0010 | Human Infant Brain | Human Infant Brain | | | | Other | |
| T0041 | Jurkat T-cell G1 phase | Jurkat T-cell | | | | pBluescript | |
| | | | | | | SK- | |
| T0042 | Jurkat T-Cell, S phase | Jurkat T-Cell Line | | | | pEluescript | |
| | | | | | | SK- | |
| T0047 | T lymphocytes > 70 | T lymphocytes > 70 | | | | pBluescript | |
| | | | | | | SK- | |
| T0049 | Aorta endothelial cells + | Aorta endothelial | | | | pBluescript | |
| | TNF-a | cells | | | SK- | | |
| T0060 | Human White Adipose | Human White Fat | | | | pBluescript | |
| | | | | | | SK- | |
| T0067 | Human Thyroid | Human Thyroid | | | | pBluescript | |
| | | | | | | SK- | |
| T0069 | Human Uterus, normal | Human Uterus, | | | | pBluescript | |
| | | normal | | | | SK- | |
| T0082 | Human Adult Retina | Human Adult Retina | | | | pBluescript | |
| | | | | | | SK- | |
| T0110 | Human colon carcinoma | | | | | pBluescript | |
| | (HCC) cell line, remake | | | | | SK- | |
| T0115 | Human Colon Carcinoma | | | | | pBluescript | |
| | (HCC) cell line | | | | | SK- | |
| L0005 | Clontech human aorta | | | | | | |
| | polyA + mRNA (#6572) | | | | | | |
| L0015 | Human | | | | | | |
| L0021 | Human adult (KOkubo) | | | | | | |
| L0055 | Human promyelocyte | | | | | | |
| L0142 | Human placenta cDNA | placenta | | | | | |
| | (TFujiwara) | | | | | | |
| L0143 | Human placenta polyA + | placenta | | | | | |
| | (TFujiwara) | | | | | | |
| L0157 | Human fetal brain | | brain | | | | |
| | (TFujiwara) | | | | | | |
| L0163 | Human heart cDNA | | heart | | | | |
| | (YNakamura) | | | | | | |
| L0352 | Normalized infant brain, | | | | | BA, M13- | |
| | Bento Soares | | | | | derived | |
| L0362 | Stratagene ovarian cancer | | | | | Bluescript | |
| | (#937219) | | | | | SK- | |
| L0364 | NCI_CGAP_GC5 | germ cell tumor | | | | Bluescript | |
| | | | | | | SK- | |
| L0366 | Stratagene schizo brain | schizophrenic brain | | | | Bluescript | |
| | S11 | S-11 frontal lobe | | | SK | | |
| L0368 | NCI_CGAP_SS1 | synovial sarcoma | | | | Bluescript | |
| | | | | | | SK- | |
| L0369 | NCI_CGAP_AA1 | adrenal adenoma | adrenal gland | | | Bluescript | |
| | | | | | | SK- | |
| L0371 | NCI_CGAP_Br3 | breast tumor | breast | | | Bluescript | |
| | | | | | | SK- | |
| L0372 | NCI_CGAP_Col2 | colon tumor | colon | | | Bluescnpt | |
| | | | | | | SK- | |
| L0375 | NCI_CGAP_Kid6 | kidney tumor | kidney | | | Bluescript | |
| | | | | | | SK- | |
| L0376 | NCI_CGAP_Lar1 | larynx | larynx | | | Bluescript | |
| | | | | | | SK- | |
| L0378 | NCI_CGAP_Lu1 | lung tumor | lung | | | Bluescript | |
| | | | | | | SK- | |
| L0381 | NCI_CGAP_HN4 | squamous cell | pharynx | | | Bluescript | |
| | | carcinoma | | | | SK- | |
| L0383 | NCI_CGAP_Pr24 | invasive tumor (cell | prostate | | | Bluescnipt | |
| | | line) | | | | SK- | |
| L0384 | NCI_CGAP_Pr23 | prostate tumor | prostate | | | Bluescript | |
| | | | | | | SK- | |
| L0387 | NCI_CGAP_GCB0 | germinal center B- | tonsil | | | Bluescript | |
| | | cells | | | SK- | | |
| L0389 | NCI_CGAP_HN5 | normal gingiva (cell | | | | Bluescnpt | |
| | | line from primary | | | | SK- | |
| | | keratinocyt | | | | | |
| L0415 | MHB3MA Cot8-HAP-Ft | | | | Lafmid BA | | |
| L0438 | normalized infant brain | total brain | brain | | | lafmid BA | |
| | cDNA | | | | | | |
| L0439 | Soares infant brain 1NIB | | whole brain | | | Lafmid BA | |
| L0455 | Human retina cDNA | retina | eye | | | lambda gt10 | |
| | randomly primed | | | | | | |
| | sublibrary | | | | | | |
| L0456 | Human retina cDNA | retina | eye | | | lambda gt10 | |
| | Tsp509I-cleaved | | | | | | |
| | sublibrary | | | | | | |
| L0471 | Human fetal heart, | | | | | Lambda ZAP | |
| | Lambda ZAP Express | | | | | Express | |
| L0475 | KG1-a Lambda Zap | | | KG1-a | | Lambda Zap | |
| | Express cDNA library | | | | | Express | |
| | | | | | | (Stratagene) | |
| L0480 | Stratagene cat#9372 12 | | | | | Lambda ZAP, | |
| | (1992) | | | | | pBluescnipt | |
| | | | | | | SK(-) | |
| L0483 | Human pancreatic islet | | | | | Lambda | |
| | | | | | | ZAPII | |
| L0485 | STRATAGENE Human | skeletal muscle | leg muscle | | | Lambda | |
| | skeletal muscle cDNA | | | | | ZAPII | |
| | library, cat. #936215. | | | | | | |
| L0493 | NCI_CGAP_Ov26 | papillary serous | ovary | | | pAMP1 | |
| | | carcinoma | | | | | |
| LO515 | NCI_CGAP_Ov32 | papillary serous | ovary | | | pAMP1 | |
| | | carcinoma | | | | | |
| L0517 | NCI_CGAP_Pr1 | | | | | pAMP10 | |
| L0518 | NCI_CGAP_Pr2 | | | | pAMP10 | | |
| L0519 | NCI_CGAP_Pr3 | | | | | pAMP10 | |
| L0520 | NCI_CGAP_Alv1 | alveolar | | | | pAMP10 | |
| | | rhabdomyosarcoma | | | | | |
| L0521 | NCI_CGAP_Ew1 | Ewing's sarcoma | | | | pAMP10 | |
| L0523 | NCI_CGAP_Lip2 | liposarcoma | | | | pAMP10 | |
| L0526 | NCI_CGAP_Prl2 | metastatic prostate | | | | pAMP10 | |
| | | bone lesion | | | | | |
| L0529 | NCI_CGAP_Pr6 | prostate | | | | pAMP10 | |
| L0564 | Jia bone marrow stroma | bone marrow stroma | | | pBluescript | | |
| L0565 | Normal Human | Bone | Hip | p | | Bluescript | |
| | Trabecular Bone Cells | | | | | | |
| L0581 | Stratagene liver (#937224) | | liver | | | pBluescript | |
| | | | | | | SK | |
| L0584 | Stratagene cDNA library | | | | | pBluescript | |
| | Human heart, cat#93 6208 | | | | | SK(+) | |
| L0588 | Stratagene endothelial cell | | | | | pBluescript | |
| | 937223 | | | | | | SK- |
| L0589 | Stratagene fetal retina | | | | | pBluescript | |
| | 937202 | | | | | | SK- |
| L0590 | Stratagene fibroblast | | | | | pBluescript | |
| | (#937212) | | | | | SK- | |
| L0591 | Stratagene HeLa cell s3 | | | | | pBluescript | |
| | 937216 | | | | | SK- | |
| L0592 | Stratagene hNT neuron | | | | | pBluescript | |
| | (#937233) | | | | | SK- | |
| L0593 | Stratagene | | | | | pBluescript | |
| | neuroepithelium | | | | | SK- | |
| | (#937231) | | | | | | |
| L0596 | Stratagene colon | | colon | | | pBluescript | |
| | (#937204) | | | | | SK- | |
| L0599 | Stratagene lung (#937210) | | lung | | | pBluescript | |
| | | | | | | SK- | |
| L0600 | Weizmann Olfactory | olfactory epithelium | nose | | | pBluescript | |
| | Epithelium | | | | SK- | | |
| L0601 | Stratagene pancreas | | pancreas | | | pBluescript | |
| | (#937208) | | | | SK- | | |
| L0602 | Pancreatic Islet | pancreatic islet | pancreas | | | pBluescript | |
| | | | | | | SK- | |
| L0603 | Stratagene placenta | | placenta | | | pBluescript | |
| | (#937225) | | | | SK- | | |
| L0604 | Stratagene muscle 937209 | muscle | skeletal | | | pBluescript | |
| | | | muscle | | | SK- | |
| L0605 | Stratagene fetal spleen | fetal spleen | spleen | | | pBluescript | |
| | (#937205) | | | | SK- | | |
| L0606 | NCI_CGAP_Lym5 | follicular lymphoma | lymph node | | | pBluescript | |
| | | | | | | SK- | |
| L0607 | NCI_CGAP_Lym6 | mantle cell | lymph node | | | pBluescript | |
| | | lymphoma | | | | SK- | |
| L0608 | Stratagene lung carcinoma | lung carcinoma | lung | NCI-H69 | | pBluescript | |
| | 937218 | | | | SK- | | |
| L0622 | HM1 | | | | | pcDNAII | |
| | | | | | | (Invitrogen) | |
| L0623 | HM3 | pectoral muscle | | | | pcDNAII | |
| | | (after mastectomy) | | | | (Invitrogen) | |
| L0629 | NCI_CGAP_Mel3 | metastatic | bowel (skin | | | pCMV- | |
| | | melanoma to bowel | primary) | | SPORT4 | | |
| L0631 | NCI_CGAP_Br7 | | breast | pCMV- | | | |
| | | | | | | SPORT4 | |
| L0636 | NCI_CGAP_Pit1 | four pooled pituitary | brain | | | pCMV- | |
| | | adenomas | | | | SPORT6 | |
| L0637 | NCI_CGAP_Brn53 | three pooled | brain | | | pCMV- | |
| | | meningiomas | | | | SPORT6 | |
| L0638 | NCI_CGAP_Brn35 | tumor, 5 pooled (see | brain | | | pCMV- | |
| | | description) | | | SPORT6 | | |
| L0639 | NCI_CGAP_Brn52 | tumor, 5 pooled (see | brain | | | pCMV- | |
| | | description) | | | | SPORT6 | |
| L0640 | NCI_CGAP_Br18 | four pooled high- | breast | | | pCMV- | |
| | | grade tumors, | | | | SPORT6 | |
| | | including two prima | | | | | |
| L0641 | NCI_CGAP_Co17 | juvenile granulosa | colon | | | pCMV- | |
| | | tumor | | | | SPORT6 | |
| L0643 | NCI_CGAP_Co19 | moderately | colon | | | pCMV- | |
| | | differentiated | | | | SPORT6 | |
| | | adenocarcinoma | | | | | |
| L0645 | NCI_CGAP_Co21 | moderately | colon | | | pCMV- | |
| | differentiated | | | | SPORT6 | | |
| | adenocarcinoma | | | | | | |
| L0646 | NCI_CGAP_Co14 | moderately- | colon | | | pCMV- | |
| | | differentiated | | | SPORT6 | | |
| | adenocarcinoma | | | | | | |
| L0647 | NCI_CGAP_Sar4 | five pooled | connective | | | pCMV- | |
| | | sarcomas, including | tissue | | | SPORT6 | |
| | | myxoid liposarcoma | | | | | |
| L0648 | NCI_CGAP_Eso2 | squamous cell | esophagus | | | pCMV- | |
| | | carcinoma | | | | SPORT6 | |
| L0649 | NCI_CGAP_GU1 | 2 pooled high-grade | genitourinary | | | pCMV- | |
| | | transitional cell | tract | | | SPORT6 | |
| | | | tumors | | | | |
| L0653 | NCI_CGAP_Lu28 | two pooled | lung | | | pCMV- | |
| | | squamous cell | | | | SPORT6 | |
| | | carcinomas | | | | | |
| L0654 | NCI_CGAP_Lu31 | | lung, cell line | | | pCMV- | |
| | | | | | | SPORT6 | |
| L0655 | NCI_CGAP_Lym12 | lymphoma, | lymph node | | | pCMV- | |
| | | follicular mixed | | | | SPORT6 | |
| | | small and large cell | | | | | |
| L0656 | NCI_CGAP_Ov38 | normal epithelium | ovary | | | pCMV- | |
| | | | | | | SPORT6 | |
| L0657 | NCI_CGAP_Ov23 | tumor, 5 pooled (see | ovary | | | pCMV- | |
| | | description) | | | | SPORT6 | |
| L0659 | NCI_CGAP_Pan1 | adenocarcinoma | pancreas | | | pCMV- | |
| | | | | | | SPORT6 | |
| L0661 | NCI_CGAP_Mel15 | malignant | skin | | | pCMV | |
| | | melanoma, | | | | SPORT6 | |
| L0662 | NCI_CGAP_Gas4 | poorly differentiated | stomach | | pCMV- | | |
| | | adenocarcinoma | | | | SPORT6 | |
| | | with signet r | | | | | |
| L0663 | NCI_CGAP_Ut2 | moderately- | uterus | | | pCMV- | |
| | | differentiated | | | | SPORT6 | |
| | | endometrial | | | | | |
| | | adenocarcino | | | | | |
| L0664 | NCI_CGAP_Ut3 | poorly-differentiated | uterus | | | pCMV- | |
| | | endometrial | | | | SPORT6 | |
| | | adenocarcinoma, | | | | | |
| L0665 | NCI_CGAP_Ut4 | serous papillary | uterus | | | pCMV- | |
| | | carcinoma, high | | | | SPORT6 | |
| | | grade, 2 pooled t | | | | | |
| L0666 | NCI_CGAP_Ut1 | well-differentiated | uterus | | | pCMV- | |
| | | endometrial | | | | SPORT6 | |
| | | adenocarcinoma, 7 | | | | | |
| L0667 | NCI_CGAP_CML1 | | myeloid cells, 18 | whole blood | | | pCMV- |
| | | pooled CML cases, | | | | SPORT6 | |
| | | BCR/ABL rearra | | | | | |
| L0717 | Gessler Wilms tumor | | | | | pSPORT1 | |
| L0731 | Soares_pregnant_uterus_{—} | | uterus | | | pT7T3-Pac | |
| | NbHPU | | | | | | |
| L0740 | Soares melanocyte | melanocyte | | | | pT7T3D | |
| | 2NbHM | | | | | (Pharmacia) | |
| | | | | | | with a | |
| | | | | | | modified | |
| | | | | | | polylinker | |
| L0742 | Soares adult brain | | brain | | | pT7T3D | |
| | N2b5HB55Y | | | | | (Pharmacia) | |
| | | | | | | with a | |
| | | | | | | modified | |
| | | | | | | polylinker | |
| L0743 | Soares breast 2NbHBst | | breast | | | pT7T3D | |
| | | | | (Pharmacia) | | | |
| | | | | | | with a | |
| | | | | | | modified | |
| | | | | | | polylinker | |
| L0744 | Soares breast 3NbHBst | | breast | | | pT7T3D | |
| | | | | (Pharmacia) | | | |
| | | | | | | with a | |
| | | | | | | modified | |
| | | | | | | polylinker | |
| L0745 | Soares retina N2b4HR | retina | eye | | | pT7T3D | |
| | | | | (Pharmacia) | | | |
| | | | | | | with a | |
| | | | | | | modified | |
| | | | | | | polylinker | |
| L0746 | Soares retina N2b5HR | retina | eye | | | pT7T3D | |
| | | | | (Pharmacia) | | | |
| | | | | | | with a | |
| | | | | | | modified | |
| | | | | | | polylinker | |
| L0747 | Soares_fetal_heart_NbHH | | heart | | | pT7T3D | |
| | 19W | | | | | (Pharmacia) | |
| | | | | | | with a | |
| | | | | | | modified | |
| L0748 | Soares fetal liver spleen | | Liver and | | pT7T3D | | |
| | 1NFLS | | Spleen | | | (Pharmacia) | |
| | | | | | | with a | |
| | | | | | | modified | |
| | | | | | | polylinker | |
| L0749 | Soares_fetal_liver_spleen | | Liver and | | | pT7T3D | |
| | _1NFLS_S1 | | Spleen | | | (Pharmacia) | |
| | | | | | | with a | |
| | | | | | | modified | |
| | | | | | | polylinker | |
| L0750 | Soares_feta_lung_NbHL1 | | lung | | | pT7T3D | |
| | 9W | | | | | (Phannacia) | |
| | | | | | | with a | |
| | | | | | | modified | |
| | | | | | | polylinker | |
| L0751 | Soares ovary tumor | ovanan tumor | ovary | | | pT7T3D | |
| | NbHOT | | | | | (Pharmacia) | |
| | | | | | | with a | |
| | | | | | | modified | |
| | | | | | | polylinker | |
| L0752 | Soares_parathyroid_tumor | parathyroid tumor | parathyroid | | | pT7T3D | |
| | _NbHPA | | gland | | | (Pharmacia) | |
| | | | | | | with a | |
| | | | | | | modified | |
| | | | | | | polylinker | |
| L0753 | Soares_pineal_gland_N3H | | pineal gland | | | pT7T3D | |
| | PG | | | | | (Pharmacia) | |
| | | | | | | with a | |
| | | | | | | modified | |
| | | | | | | polylinker | |
| L0754 | Soares placenta Nb2HP | | placenta | | | pT7T3D | |
| | | | | (Pharmacia) | | | |
| | | | | | | with a | |
| | | | | | | modified | |
| | | | | | | polylinker | |
| L0755 | Scares_placenta_8to9wee | | placenta | | | pT7T3D | |
| | ks_2NbHP8to9W | | | | | (Pharmacia) | |
| | | | | | | with a | |
| | | | | | | modified | |
| | | | | | | polylinker | |
| L0756 | Scares_multiple_sclerosis | multiple sclerosis | | | | pT7T3D | |
| | _2NbHMSP | lesions | | | | (Pharmacia) | |
| | | | | | | with a | |
| | | | | | | modified | |
| | | | | | | polylinker | |
| | | | | | | V_TYPE | |
| L0757 | Scares_senescent_fibrobla | senescent fibroblast | | | | pT7T3D | |
| | sts_NbHSF | | | | | (Pharmacia) | |
| | | | | | | with a | |
| | | | | | | modified | |
| | | | | | | polylinker | |
| | | | | | | V_TYPE | |
| L0758 | Scares_testis_NHT | | | | | pT7T3D-Pac | |
| | | | | (Pharmacia) | | | |
| | | | | | | with a | |
| | | | | | | modified | |
| | | | | | | polylinker | |
| L0759 | Scares_total_fetus_Nb2H | | | | | pT7T3D-Pac | |
| | F8_9w | | | | | (Pharmacia) | |
| | | | | | | with a | |
| | | | | | | modified | |
| | | | | | | polylinker | |
| L0761 | NCI_CGAP_CLL1 | B-cell, chronic | | | | pT7T3D-Pac | |
| | | lymphotic leukemia | | | | (Pharmacia) | |
| | | | | | | with a | |
| | | | | | | modified | |
| | | | | | | polylinker | |
| L0762 | NCI_CGAP_Br1.1 | breast | | | | pT7T3D-Pac | |
| | | | | (Pharmacia) | | | |
| | | | | | | with a | |
| | | | | | | modified | |
| | | | | | | polylinker | |
| L0763 | NCI_CGAP_Br2 | breast | | | | pT7T3D-Pac | |
| | | | | (Pharmacia) | | | |
| | | | | | | with a | |
| | | | | | | modified | |
| | | | | | | polylinker | |
| L0764 | NCI_CGAP_Co3 | colon | | | | pT7T3D-Pac | |
| | | | | (Pharmacia) | | | |
| | | | | | | with a | |
| | | | | | | modified | |
| | | | | | | polylinker | |
| L0766 | NCI_CGAP_GCB1 | germinal center B | | | | pT7T3D-Pac | |
| | | cell | | | | (Pharmacia) | |
| | | | | | | with a | |
| | | | | | | modified | |
| | | | | | | polylinker | |
| L0768 | NCI_CGAP_GC4 | pooled germ cell | | | | pT7T3D-Pac | |
| | | tumors | | | | (Pharmacia) | |
| | | | | | | with a | |
| | | | | | | modified | |
| | | | | | | polylinker | |
| L0769 | NCI_CGAP_Brn25 | anaplastic | brain | | | pT7T3D-Pac | |
| | | oligodendroglioma | | | | (Pharmacia) | |
| | | | | | | with a | |
| | | | | | | modified | |
| | | | | | | polylinker | |
| L0770 | NCI_CGAP_Brn23 | glioblastoma | brain | | | pT7T3D-Pac | |
| | | (pooled) | | | | (Pharmacia) | |
| | | | | | | with a | |
| | | | | | | modified | |
| | | | | | | polylinker | |
| L0771 | NCI_CGAP_Co8 | adenocarcinoma | colon | | | pT7T3D-Pac | |
| | | | | | | (Pharmacia) | |
| | | | | | | with a | |
| | | | | | | modified | |
| | | | | | | polylinker | |
| L0772 | NCI_CGAP_Co10 | colon tumor RER+ | colon | | | pT7T3D-Pac | |
| | | | | | | (Pharmacia) | |
| | | | | | | with a | |
| | | | | | | modified | |
| | | | | | | polylinker | |
| L0773 | NCI_CGAP_Co9 | colon tumor RER+ | colon | | | pT7T3D-Pac | |
| | | | | | | (Pharmacia) | |
| | | | | | | with a | |
| | | | | | | modified | |
| | | | | | | polylinker | |
| L0774 | NCI_CGAP_Kid3 | | kidney | | | pT7T3D-Pac | |
| | | | | | | (Pharmacia) | |
| | | | | | | with a | |
| | | | | | | modified | |
| | | | | | | polylinker | |
| L0775 | NCI_CGAP_Kid5 | 2 pooled tumors | kidney | | | pT7T3D-Pac | |
| | | (clear cell type) | | | | (Pharmacia) | |
| | | | | | | with a | |
| | | | | | | modified | |
| | | | | | | polylinker | |
| L0776 | NCI_CGAP_Lu5 | carcinoid | lung | | | pT7T3D-Pac | |
| | | | | | | (Pharmacia) | |
| | | | | | | with a | |
| | | | | | | modified | |
| | | | | | | polylinker | |
| L0777 | Soares_NhHMPu_S1 | Pooled human | mixed (see | | | pT7T3D-Pac | |
| | | melanocyte, fetal | below) | | | (Pharmacia) | |
| | | heart, and pregnant | | | | with a | |
| | | | | | | modified | |
| | | | | | | polylinker | |
| L0779 | Soares_NFL_T_GBC_S1 | | pooled | | | pT7T3D-Pac | |
| | | | | | | (Pharmacia) | |
| | | | | | | with a | |
| | | | | | | modified | |
| | | | | | | polylinker | |
| L0782 | NCI_CGAP_Pr21 | normal prostate | prostate | | | pT7T3D-Pac | |
| | | | | | | (Pharmacia) | |
| | | | | | | with a | |
| | | | | | | modified | |
| | | | | | | polylinker | |
| L0783 | NCI_CGAP_Pr22 | normal prostate | prostate | | | pT7T3D-Pac | |
| | | | | | | (Pharmacia) | |
| | | | | | | with a | |
| | | | | | | modified | |
| | | | | | | polylinker | |
| L0784 | NCI_CGAP_Lei2 | leiomyosarcoma | soft tissue | | | pT7T3D-Pac | |
| | | | | | | (Pharmacia) | |
| | | | | | | with a | |
| | | | | | | modified | |
| | | | | | | polylinker | |
| L0786 | Soares_NbHFB | | whole brain | | | pT7T3D-Pnc | |
| | | | | | | (Pharmacia) | |
| | | | | | | with a | |
| | | | | | | modified | |
| | | | | | | polylinker | |
| L0787 | NCI_CGAP_Sub1 | | | | | pT7T3D-Pac | |
| | | | | (Pharmacia) | | | |
| | | | | | | with a | |
| | | | | | | modified | |
| | | | | | | polylinker | |
| L0788 | NCI_CGAP_Sub2 | | | | | pT7T3D-Pac | |
| | | | | (Pharmacia) | | | |
| | | | | | | with a | |
| | | | | | | modified | |
| | | | | | | polylinker | |
| L0789 | NCI_CGAP_Sub3 | | | | | pT7T3D-Pac | |
| | | | | (Pharmacia) | | | |
| | | | | | | with a | |
| | | | | | | modified | |
| | | | | | | polylinker | |
| L0790 | NCI_CGAP_Sub4 | | | | | pT7T3D-Pac | |
| | | | | (Pharmacia) | | | |
| | | | | | | with a | |
| | | | | | | modified | |
| | | | | | | polylinker | |
| L0791 | NCI_CGAP_Sub5 | | | | | pT7T3D-Pac | |
| | | | | (Pharmacia) | | | |
| | | | | | | with a | |
| | | | | | | modified | |
| | | | | | | polylinker | |
| L0792 | NCI_CGAP_Sub6 | | | | | pT7T3D-Pac | |
| | | | | | | (Pharmacia) | |
| | | | | | | with a | |
| | | | | | | modified | |
| | | | | | | polylinker | |
| L0793 | NCI_CGAP_Sub7 | | | | | pT7T3D-Pac | |
| | | | | (Pharmacia) | | | |
| | | | | | | with a | |
| | | | | | | modified | |
| | | | | | | polylinker | |
| L0794 | NCI_CGAP_GC6 | pooled germ cell | | | | pT7T3D-Pac | |
| | | tumors | | | | (Pharmacia) | |
| | | | | | | with a | |
| | | | | | | modified | |
| | | | | | | polylinker | |
| L0796 | NCI_CGAP_Brn50 | medulloblastoma | brain | | | pT7T3D-Pac | |
| | | | | | | (Pharmacia) | |
| | | | | | | with a | |
| | | | | | | modified | |
| | | | | | | polylinker | |
| L0800 | NCI_CGAP_Co16 | colon tumor, RER+ | colon | | | pT7T3D-Pac | |
| | | | | | | (Pharmacia) | |
| | | | | | | with a | |
| | | | | | | modified | |
| | | | | | | polylinker | |
| L0803 | NCI_CGAP_Kid11 | | kidney | | | pT7T3D-Pac | |
| | | | | | | (Pharmacia) | |
| | | | | | | with a | |
| | | | | | | modified | |
| | | | | | | polylinker | |
| L0804 | NCI_CGAP_Kid12 | 2 pooled tumors | kidney | | | pT7T3D-Pac | |
| | | (clear cell type) | | | | (Pharmacia) | |
| | | | | | | with a | |
| | | | | | | modified | |
| | | | | | | polylinker | |
| L0805 | NCI_CGAP_Lu24 | carcinoid | lung | | | pT7T3D-Pac | |
| | | | | | | (Pharmacia) | |
| | | | | | | with a | |
| | | | | | | modified | |
| | | | | | | polylinker | |
| L0806 | NCI_CGAP_Lu19 | squamous cell | lung | | | pT7T3D-Pac | |
| | | carcinoma, poorly | | | | (Pharmacia) | |
| | | differentiated (4 | | | | with a | |
| | | | | | | modified | |
| | | | | | | polylinker | |
| L0807 | NCI_CGAP_Ov18 | fibrotheoma | ovary | | | pT7T3D-Pac | |
| | | | | (Pharmacia) | | | |
| | | | | | | with a | |
| | | | | | | modified | |
| | | | | | | polylinker | |
| L0809 | NCI_CGAP_Pr28 | | prostate | | | pT7T3D-Pac | |
| | | | | (Pharmacia) | | | |
| | | | | | | with a | |
| | | | | | | modified | |
| | | | | | | polylinker | |
| L2251 | Human fetal lung | Fetal lung | | | | | |

[0096] TABLE 5

| | |
|---|---|
| OMIM | Description |
| Reference | |

No entry.

[0097] Polynucleotide and Polypeptide Variants

[0098] The present invention is directed to variants of the polynucleotide sequence disclosed in SEQ ID NO:X or the complementary strand thereto, nucleotide sequences encoding the polypeptide of SEQ ID NO:Y, the nucleotide sequence of SEQ ID NO:X encoding the polypeptide sequence as defined in column 7 of Table 1A, nucleotide sequences encoding the polypeptide as defined in column 7 of Table 1A, the nucleotide sequence as defined in columns 8 and 9 of Table 2, nucleotide sequences encoding the polypeptide encoded by the nucleotide sequence as defined in columns 8 and 9 of Table 2, the nucleotide sequence as defined in column 6 of Table 1B, nucleotide sequences encoding the polypeptide encoded by the nucleotide sequence as defined in column 6 of Table 1B, the cDNA sequence contained in Clone ID NO:Z, and/or nucleotide sequences encoding the polypeptide encoded by the cDNA sequence contained in Clone ID NO:Z.

[0099] The present invention also encompasses variants of the polypeptide sequence disclosed in SEQ ID NO:Y, the polypeptide sequence as defined in column 7 of Table 1A, a polypeptide sequence encoded by the polynucleotide sequence in SEQ ID NO:X, a polypeptide sequence encoded by the nucleotide sequence as defined in columns 8 and 9 of Table 2, a polypeptide sequence encoded by the nucleotide sequence as defined in column 6 of Table 1B, a polypeptide sequence encoded by the complement of the polynucleotide sequence in SEQ ID NO:X, and/or a polypeptide sequence encoded by the cDNA sequence contained in Clone ID NO:Z.

[0100] “Variant” refers to a polynucleotide or polypeptide differing from the polynucleotide or polypeptide of the present invention, but retaining essential properties thereof. Generally, variants are overall closely similar, and, in many regions, identical to the polynucleotide or polypeptide of the present invention.

[0101] Thus, one aspect of the invention provides an isolated nucleic acid molecule comprising, or alternatively consisting of, a polynucleotide having a nucleotide sequence selected from the group consisting of: (a) a nucleotide sequence described in SEQ ID NO:X or contained in the cDNA sequence of Clone ID NO:Z; (b) a nucleotide sequence in SEQ ID NO:X or the cDNA in Clone ID NO:Z which encodes the complete amino acid sequence of SEQ ID NO:Y or the complete amino acid sequence encoded by the cDNA in Clone ID NO:Z; (c) a nucleotide sequence in SEQ ID NO:X or the cDNA in Clone ID NO:Z which encodes a mature polypeptide; (d) a nucleotide sequence in SEQ ID NO:X or the cDNA sequence of Clone ID NO:Z, which encodes a biologically active fragment of a polypeptide; (e) a nucleotide sequence in SEQ ID NO:X or the cDNA sequence of Clone ID NO:Z, which encodes an antigenic fragment of a polypeptide; (f) a nucleotide sequence encoding a polypeptide comprising the complete amino acid sequence of SEQ ID NO:Y or the complete amino acid sequence encoded by the cDNA in Clone ID NO:Z; (g) a nucleotide sequence encoding a mature polypeptide of the amino acid sequence of SEQ ID NO:Y or the amino acid sequence encoded by the cDNA in Clone ID NO:Z; (h) a nucleotide sequence encoding a biologically active fragment of a polypeptide having the complete amino acid sequence of SEQ ID NO:Y or the complete amino acid sequence encoded by the cDNA in Clone ID NO:Z; (i) a nucleotide sequence encoding an antigenic fragment of a polypeptide having the complete amino acid sequence of SEQ ID NO:Y or the complete amino acid sequence encoded by the cDNA in Clone ID NO:Z; and (j) a nucleotide sequence complementary to any of the nucleotide sequences in (a), (b), (c), (d), (e), (f), (g), (h), or (i) above.

[0102] The present invention is also directed to nucleic acid molecules which comprise, or alternatively consist of, a nucleotide sequence which is at least 80%, 85%, 90%, 95%, 96%, 97%, 98%, 99% or 100%, identical to, for example, any of the nucleotide sequences in (a), (b), (c), (d), (e), (f), (g), (h), (i), or (j) above, the nucleotide coding sequence in SEQ ID NO:X or the complementary strand thereto, the nucleotide coding sequence of the cDNA contained in Clone ID NO:Z or the complementary strand thereto, a nucleotide sequence encoding the polypeptide of SEQ ID NO:Y, a nucleotide sequence encoding a polypeptide sequence encoded by the nucleotide sequence in SEQ ID NO:X, a polypeptide sequence encoded by the complement of the polynucleotide sequence in SEQ ID NO:X, a nucleotide sequence encoding the polypeptide encoded by the cDNA contained in Clone ID NO:Z, the nucleotide coding sequence in SEQ ID NO:X as defined in columns 8 and 9 of Table 2 or the complementary strand thereto, a nucleotide sequence encoding the polypeptide encoded by the nucleotide sequence in SEQ ID NO:X as defined in columns 8 and 9 of Table 2 or the complementary strand thereto, the nucleotide coding sequence in SEQ ID NO:B as defined in column 6 of Table 1B or the complementary strand thereto, a nucleotide sequence encoding the polypeptide encoded by the nucleotide sequence in SEQ ID NO:B as defined in column 6 of Table 1B or the complementary strand thereto, the nucleotide sequence in SEQ ID NO:X encoding the polypeptide sequence as defined in column 7 of Table 1A or the complementary strand thereto, nucleotide sequences encoding the polypeptide as defined in column 7 of Table 1A or the complementary strand thereto, and/or polynucleotide fragments of any of these nucleic acid molecules (e.g., those fragments described herein). Polynucleotides which hybridize to the complement of these nucleic acid molecules under stringent hybridization conditions or alternatively, under lower stringency conditions, are also encompassed by the invention, as are polypeptides encoded by these polynucleotides and nucleic acids.

[0103] In a preferred embodiment, the invention encompasses nucleic acid molecules which comprise, or alternatively, consist of a polynucleotide which hybridizes under stringent hybridization conditions, or alternatively, under lower stringency conditions, to a polynucleotide in (a), (b), (c), (d), (e), (f), (g), (h), or (i), above, as are polypeptides encoded by these polynucleotides. In another preferred embodiment, polynucleotides which hybridize to the complement of these nucleic acid molecules under stringent hybridization conditions, or alternatively, under lower stringency conditions, are also encompassed by the invention, as are polypeptides encoded by these polynucleotides.

[0104] In another embodiment, the invention provides a purified protein comprising, or alternatively consisting of, a polypeptide having an amino acid sequence selected from the group consisting of: (a) the complete amino acid sequence of SEQ ID NO:Y or the complete amino acid sequence encoded by the cDNA in Clone ID NO:Z; (b) the amino acid sequence of a mature form of a polypeptide having the amino acid sequence of SEQ ID NO:Y or the amino acid sequence encoded by the cDNA in Clone ID NO:Z; (c) the amino acid sequence of a biologically active fragment of a polypeptide having the complete amino acid sequence of SEQ ID NO:Y or the complete amino acid sequence encoded by the cDNA in Clone ID NO:Z; and (d) the amino acid sequence of an antigenic fragment of a polypeptide having the complete amino acid sequence of SEQ ID NO:Y or the complete amino acid sequence encoded by the cDNA in Clone ID NO:Z.

[0105] The present invention is also directed to proteins which comprise, or alternatively consist of, an amino acid sequence which is at least 80%, 85%, 90%, 95%, 96%, 97%, 98%, 99% or 100%, identical to, for example, any of the amino acid sequences in (a), (b), (c), or (d), above, the amino acid sequence shown in SEQ ID NO:Y, the amino acid sequence encoded by the cDNA contained in Clone ID NO:Z, the amino acid sequence of the polypeptide encoded by the nucleotide sequence in SEQ ID NO:X as defined in columns 8 and 9 of Table 2, the amino acid sequence of the polypeptide encoded by the nucleotide sequence in SEQ ID NO:B as defined in column 6 of Table 1B, the amino acid sequence as defined in column 7 of Table 1A, an amino acid sequence encoded by the nucleotide sequence in SEQ ID NO:X, and an amino acid sequence encoded by the complement of the polynucleotide sequence in SEQ ID NO:X. Fragments of these polypeptides are also provided (e.g., those fragments described herein). Further proteins encoded by polynucleotides which hybridize to the complement of the nucleic acid molecules encoding these amino acid sequences under stringent hybridization conditions or alternatively, under lower stringency conditions, are also encompassed by the invention, as are the polynucleotides encoding these proteins.

[0106] By a nucleic acid having a nucleotide sequence at least, for example, 95% “identical” to a reference nucleotide sequence of the present invention, it is intended that the nucleotide sequence of the nucleic acid is identical to the reference sequence except that the nucleotide sequence may include up to five point mutations per each 100 nucleotides of the reference nucleotide sequence encoding the polypeptide. In other words, to obtain a nucleic acid having a nucleotide sequence at least 95% identical to a reference nucleotide sequence, up to 5% of the nucleotides in the reference sequence may be deleted or substituted with another nucleotide, or a number of nucleotides up to 5% of the total nucleotides in the reference sequence may be inserted into the reference sequence. The query sequence may be an entire sequence referred to in Table 1A or 2 as the ORF (open reading frame), or any fragment specified as described herein.

[0107] As a practical matter, whether any particular nucleic acid molecule or polypeptide is at least 80%, 85%, 90%, 95%, 96%, 97%, 98% or 99% identical to a nucleotide sequence of the present invention can be determined conventionally using known computer programs. A preferred method for determining the best overall match between a query sequence (a sequence of the present invention) and a subject sequence, also referred to as a global sequence alignment, can be determined using the FASTDB computer program based on the algorithm of Brutlag et al. (Comp. App. Biosci. 6:237-245 (1990)). In a sequence alignment the query and subject sequences are both DNA sequences. An RNA sequence can be compared by converting U's to T's. The result of said global sequence alignment is expressed as percent identity. Preferred parameters used in a FASTDB alignment of DNA sequences to calculate percent identity are: Matrix=Unitary, k-tuple=4, Mismatch Penalty=1, Joining Penalty=30, Randomization Group Length=0, Cutoff Score=1, Gap Penalty=5, Gap Size Penalty 0.05, Window Size=500 or the length of the subject nucleotide sequence, whichever is shorter.

[0108] If the subject sequence is shorter than the query sequence because of 5′ or 3′ deletions, not because of internal deletions, a manual correction must be made to the results. This is because the FASTDB program does not account for 5′ and 3′ truncations of the subject sequence when calculating percent identity. For subject sequences truncated at the 5′ or 3′ ends, relative to the query sequence, the percent identity is corrected by calculating the number of bases of the query sequence that are 5′ and 3′ of the subject sequence, which are not matched/aligned, as a percent of the total bases of the query sequence. Whether a nucleotide is matched/aligned is determined by results of the FASTDB sequence alignment. This percentage is then subtracted from the percent identity, calculated by the above FASTDB program using the specified parameters, to arrive at a final percent identity score. This corrected score is what is used for the purposes of the present invention. Only bases outside the 5′ and 3′ bases of the subject sequence, as displayed by the FASTDB alignment, which are not matched/aligned with the query sequence, are calculated for the purposes of manually adjusting the percent identity score.

[0109] For example, a 90 base subject sequence is aligned to a 100 base query sequence to determine percent identity. The deletions occur at the 5′ end of the subject sequence and therefore, the FASTDB alignment does not show a matched/alignment of the first 10 bases at 5′ end. The 10 unpaired bases represent 10% of the sequence (number of bases at the 5′ and 3′ ends not matched/total number of bases in the query sequence) so 10% is subtracted from the percent identity score calculated by the FASTDB program. If the remaining 90 bases were perfectly matched the final percent identity would be 90%. In another example, a 90 base subject sequence is compared with a 100 base query sequence. This time the deletions are internal deletions so that there are no bases on the 5′ or 3′ of the subject sequence which are not matched/aligned with the query. In this case the percent identity calculated by FASTDB is not manually corrected. Once again, only bases 5′ and 3′ of the subject sequence which are not matched/aligned with the query sequence are manually corrected for. No other manual corrections are to be made for the purposes of the present invention.

[0110] By a polypeptide having an amino acid sequence at least, for example, 95% “identical” to a query amino acid sequence of the present invention, it is intended that the amino acid sequence of the subject polypeptide is identical to the query sequence except that the subject polypeptide sequence may include up to five amino acid alterations per each 100 amino acids of the query amino acid sequence. In other words, to obtain a polypeptide having an amino acid sequence at least 95% identical to a query amino acid sequence, up to 5% of the amino acid residues in the subject sequence may be inserted, deleted, (indels) or substituted with another amino acid. These alterations of the reference sequence may occur at the amino or carboxy terminal positions of the reference amino acid sequence or anywhere between those terminal positions, interspersed either individually among residues in the reference sequence or in one or more contiguous groups within the reference sequence.

[0111] As a practical matter, whether any particular polypeptide is at least 80%, 85%, 90%, 95%, 96%, 97%, 98% or 99% identical to, for instance, the amino acid sequence of a polypeptide referred to in Table 1A (e.g., the amino acid sequence identified in column 6) or Table 2 (e.g., the amino acid sequence of the polypeptide encoded by the polynucleotide sequence defined in columns 8 and 9 of Table 2) or a fragment thereof, the amino acid sequence of the polypeptide encoded by the polynucleotide sequence in SEQ ID NO:B as defined in column 6 of Table 1B or a fragment thereof, the amino acid sequence of the polypeptide encoded by the nucleotide sequence in SEQ ID NO:X or a fragment thereof, or the amino acid sequence of the polypeptide encoded by cDNA contained in Clone ID NO:Z, or a fragment thereof, can be determined conventionally using known computer programs. A preferred method for determining the best overall match between a query sequence (a sequence of the present invention) and a subject sequence, also referred to as a global sequence alignment, can be determined using the FASTDB computer program based on the algorithm of Brutlag et al. (Comp. App. Biosci.6:237-245 (1990)). In a sequence alignment the query and subject sequences are either both nucleotide sequences or both amino acid sequences. The result of said global sequence alignment is expressed as percent identity. Preferred parameters used in a FASTDB amino acid alignment are: Matrix=PAM 0, k-tuple=2, Mismatch Penalty=1, Joining Penalty=20, Randomization Group Length=0, Cutoff Score=1, Window Size=sequence length, Gap Penalty=5, Gap Size Penalty=0.05, Window Size=500 or the length of the subject amino acid sequence, whichever is shorter.

[0112] If the subject sequence is shorter than the query sequence due to N- or C-terminal deletions, not because of internal deletions, a manual correction must be made to the results. This is because the FASTDB program does not account for N- and C-terminal truncations of the subject sequence when calculating global percent identity. For subject sequences truncated at the N- and C-termini, relative to the query sequence, the percent identity is corrected by calculating the number of residues of the query sequence that are N- and C-=terminal of the subject sequence, which are not matched/aligned with a corresponding subject residue, as a percent of the total bases of the query sequence. Whether a residue is matched/aligned is determined by results of the FASTDB sequence alignment. This percentage is then subtracted from the percent identity, calculated by the above FASTDB program using the specified parameters, to arrive at a final percent identity score. This final percent identity score is what is used for the purposes of the present invention. Only residues to the N- and C-termini of the subject sequence, which are not matched/aligned with the query sequence, are considered for the purposes of manually adjusting the percent identity score. That is, only query residue positions outside the farthest N- and C- terminal residues of the subject sequence.

[0113] For example, a 90 amino acid residue subject sequence is aligned with a 100 residue query sequence to determine percent identity. The deletion occurs at the N-terminus of the subject sequence and therefore, the FASTDB alignment does not show a matching/alignment of the first 10 residues at the N-terminus. The 10 unpaired residues represent 10% of the sequence (number of residues at the N- and C- termini not matched/total number of residues in the query sequence) so 10% is subtracted from the percent identity score calculated by the FASTDB program. If the remaining 90 residues were perfectly matched the final percent identity would be 90%. In another example, a 90 residue subject sequence is compared with a 100 residue query sequence. This time the deletions are internal deletions so there are no residues at the N- or C-termini of the subject sequence which are not matched/aligned with the query. In this case the percent identity calculated by FASTDB is not manually corrected. Once again, only residue positions outside the N- and C-terminal ends of the subject sequence, as displayed in the FASTDB alignment, which are not matched/aligned with the query sequnce are manually corrected for. No other manual corrections are to made for the purposes of the present invention.

[0114] The polynucleotide variants of the invention may contain alterations in the coding regions, non-coding regions, or both. Especially preferred are polynucleotide variants containing alterations which produce silent substitutions, additions, or deletions, but do not alter the properties or activities of the encoded polypeptide. Nucleotide variants produced by silent substitutions due to the degeneracy of the genetic code are preferred. Moreover, polypeptide variants in which less than 50, less than 40, less than 30, less than 20, less than 10, or 5-50, 5-25, 5-10, 1-5, or 1-2 amino acids are substituted, deleted, or added in any combination are also preferred. Polynucleotide variants can be produced for a variety of reasons, e.g., to optimize codon expression for a particular host (change codons in the human mRNA to those preferred by a bacterial host such as E. coli).

[0115] Naturally occurring variants are called “allelic variants,” and refer to one of several alternate forms of a gene occupying a given locus on a chromosome of an organism. (Genes II, Lewin, B., ed., John Wiley & Sons, New York (1985)). These allelic variants can vary at either the polynucleotide and/or polypeptide level and are included in the present invention. Alternatively, non-naturally occurring variants may be produced by mutagenesis techniques or by direct synthesis.

[0116] Using known methods of protein engineering and recombinant DNA technology, variants may be generated to improve or alter the characteristics of the polypeptides of the present invention. For instance, one or more amino acids can be deleted from the N-terminus or C-terminus of the polypeptide of the present invention without substantial loss of biological function. As an example, Ron et al. (J. Biol. Chem. 268: 2984-2988 (1993)) reported variant KGF proteins having heparin binding activity even after deleting 3, 8, or 27 amino-terminal amino acid residues. Similarly, Interferon gamma exhibited up to ten times higher activity after deleting 8-10 amino acid residues from the carboxy terminus of this protein. (Dobeli et al., J. Biotechnology 7:199-216 (1988).)

[0117] Moreover, ample evidence demonstrates that variants often retain a biological activity similar to that of the naturally occurring protein. For example, Gayle and coworkers (J. Biol. Chem. 268:22105-22111 (1993)) conducted extensive mutational analysis of human cytokine IL-1a. They used random mutagenesis to generate over 3,500 individual IL-1a mutants that averaged 2.5 amino acid changes per variant over the entire length of the molecule. Multiple mutations were examined at every possible amino acid position. The investigators found that “[m]ost of the molecule could be altered with little effect on either [binding or biological activity].” In fact, only 23 unique amino acid sequences, out of more than 3,500 nucleotide sequences examined, produced a protein that significantly differed in activity from wild-type.

[0118] Furthermore, even if deleting one or more amino acids from the N-terminus or C-terminus of a polypeptide results in modification or loss of one or more biological functions, other biological activities may still be retained. For example, the ability of a deletion variant to induce and/or to bind antibodies which recognize the secreted form will likely be retained when less than the majority of the residues of the secreted form are removed from the N-terminus or C-terminus. Whether a particular polypeptide lacking N- or C-terminal residues of a protein retains such immunogenic activities can readily be determined by routine methods described herein and otherwise known in the art.

[0119] Thus, the invention further includes polypeptide variants which show a functional activity (e.g., biological activity) of the polypeptides of the invention. Such variants include deletions, insertions, inversions, repeats, and substitutions selected according to general rules known in the art so as have little effect on activity.

[0120] The present application is directed to nucleic acid molecules at least 80%, 85%, 90%, 95%, 96%, 97%, 98%, 99% or 100% identical to the nucleic acid sequences disclosed herein, (e.g., encoding a polypeptide having the amino acid sequence of an N and/or C terminal deletion), irrespective of whether they encode a polypeptide having functional activity. This is because even where a particular nucleic acid molecule does not encode a polypeptide having functional activity, one of skill in the art would still know how to use the nucleic acid molecule, for instance, as a hybridization probe or a polymerase chain reaction (PCR) primer. Uses of the nucleic acid molecules of the present invention that do not encode a polypeptide having functional activity include, inter alia, (1) isolating a gene or allelic or splice variants thereof in a cDNA library; (2) in situ hybridization (e.g., “FISH”) to metaphase chromosomal spreads to provide precise chromosomal location of the gene, as described in Verma et al., Human Chromosomes: A Manual of Basic Techniques, Pergamon Press, New York (1988); (3) Northern Blot analysis for detecting mRNA expression in specific tissues (e.g., normal or diseased tissues); and (4) in situ hybridization (e.g., histochemistry) for detecting mRNA expression in specific tissues (e.g., normal or diseased tissues).

[0121] Preferred, however, are nucleic acid molecules having sequences at least 80%, 85%, 90%, 95%, 96%, 97%, 98%, 99% or 100% identical to the nucleic acid sequences disclosed herein, which do, in fact, encode a polypeptide having functional activity. By a polypeptide having “functional activity” is meant, a polypeptide capable of displaying one or more known functional activities associated with a full-length (complete) protein of the invention. Such functional activities include, but are not limited to, biological activity, antigenicity [ability to bind (or compete with a polypeptide of the invention for binding) to an anti-polypeptide of the invention antibody], immunogenicity (ability to generate antibody which binds to a specific polypeptide of the invention), ability to form multimers with polypeptides of the invention, and ability to bind to a receptor or ligand for a polypeptide of the invention.

[0122] The functional activity of the polypeptides, and fragments, variants and derivatives of the invention, can be assayed by various methods.

[0123] For example, in one embodiment where one is assaying for the ability to bind or compete with a full-length polypeptide of the present invention for binding to an anti-polypetide antibody, various immunoassays known in the art can be used, including but not limited to, competitive and non-competitive assay systems using techniques such as radioimmunoassays, ELISA (enzyme linked immunosorbent assay), “sandwich” immunoassays, immunoradiometric assays, gel diffusion precipitation reactions, immunodiffusion assays, in situ immunoassays (using colloidal gold, enzyme or radioisotope labels, for example), western blots, precipitation reactions, agglutination assays (e.g., gel agglutination assays, hemagglutination assays), complement fixation assays, immunofluorescence assays, protein A assays, and immunoelectrophoresis assays, etc. In one embodiment, antibody binding is detected by detecting a label on the primary antibody. In another embodiment, the primary antibody is detected by detecting binding of a secondary antibody or reagent to the primary antibody. In a further embodiment, the secondary antibody is labeled. Many means are known in the art for detecting binding in an immunoassay and are within the scope of the present invention.

[0124] In another embodiment, where a ligand is identified, or the ability of a polypeptide fragment, variant or derivative of the invention to multimerize is being evaluated, binding can be assayed, e.g., by means well-known in the art, such as, for example, reducing and non-reducing gel chromatography, protein affinity chromatography, and affinity blotting. See generally, Phizicky et al., Microbiol. Rev. 59:94-123 (1995). In another embodiment, the ability of physiological correlates of a polypeptide of the present invention to bind to a substrate(s) of the polypeptide of the invention can be routinely assayed using techniques known in the art.

[0125] In addition, assays described herein (see Examples) and otherwise known in the art may routinely be applied to measure the ability of polypeptides of the present invention and fragments, variants and derivatives thereof to elicit polypeptide related biological activity (either in vitro or in vivo). Other methods will be known to the skilled artisan and are within the scope of the invention.

[0126] Of course, due to the degeneracy of the genetic code, one of ordinary skill in the art will immediately recognize that a large number of the nucleic acid molecules having a sequence at least 80%, 85%, 90%, 95%, 96%, 97%, 98%, 99%, or 100% identical to, for example, the nucleic acid sequence of the cDNA contained in Clone ID NO:Z, the nucleic acid sequence referred to in Table 1A (SEQ ID NO:X), the nucleic acid sequence disclosed in Table 2 (e.g. the nucleic acid sequence delineated in columns 8 and 9) or fragments thereof, will encode polypeptides “having functional activity.” In fact, since degenerate variants of any of these nucleotide sequences all encode the same polypeptide, in many instances, this will be clear to the skilled artisan even without performing the above described comparison assay. It will be further recognized in the art that, for such nucleic acid molecules that are not degenerate variants, a reasonable number will also encode a polypeptide having functional activity. This is because the skilled artisan is fully aware of amino acid substitutions that are either less likely or not likely to significantly effect protein function (e.g., replacing one aliphatic amino acid with a second aliphatic amino acid), as further described below.

[0127] For example, guidance concerning how to make phenotypically silent amino acid substitutions is provided in Bowie et al., “Deciphering the Message in Protein Sequences: Tolerance to Amino Acid Substitutions,” Science 247:1306-1310 (1990), wherein the authors indicate that there are two main strategies for studying the tolerance of an amino acid sequence to change.

[0128] The first strategy exploits the tolerance of amino acid substitutions by natural selection during the process of evolution. By comparing amino acid sequences in different species, conserved amino acids can be identified. These conserved amino acids are likely important for protein function. In contrast, the amino acid positions where substitutions have been tolerated by natural selection indicates that these positions are not critical for protein function. Thus, positions tolerating amino acid substitution could be modified while still maintaining biological activity of the protein.

[0129] The second strategy uses genetic engineering to introduce amino acid changes at specific positions of a cloned gene to identify regions critical for protein function. For example, site directed mutagenesis or alanine-scanning mutagenesis (introduction of single alanine mutations at every residue in the molecule) can be used. See Cunningham and Wells, Science 244:1081-1085 (1989). The resulting mutant molecules can then be tested for biological activity.

[0130] As the authors state, these two strategies have revealed that proteins are surprisingly tolerant of amino acid substitutions. The authors further indicate which amino acid changes are likely to be permissive at certain amino acid positions in the protein. For example, most buried (within the tertiary structure of the protein) amino acid residues require nonpolar side chains, whereas few features of surface side chains are generally conserved. Moreover, tolerated conservative amino acid substitutions involve replacement of the aliphatic or hydrophobic amino acids Ala, Val, Leu and Ile; replacement of the hydroxyl residues Ser and Thr; replacement of the acidic residues Asp and Glu; replacement of the amide residues Asn and Gln, replacement of the basic residues Lys, Arg, and His; replacement of the aromatic residues Phe, Tyr, and Trp, and replacement of the small-sized amino acids Ala, Ser, Thr, Met, and Gly. Besides conservative amino acid substitution, variants of the present invention include (i) substitutions with one or more of the non-conserved amino acid residues, where the substituted amino acid residues may or may not be one encoded by the genetic code, or (ii) substitutions with one or more of the amino acid residues having a substituent group, or (iii) fusion of the mature polypeptide with another compound, such as a compound to increase the stability and/or solubility of the polypeptide (for example, polyethylene glycol), (iv) fusion of the polypeptide with additional amino acids, such as, for example, an IgG Fc fusion region peptide, serum albumin (preferably human serum albumin) or a fragment thereof, or leader or secretory sequence, or a sequence facilitating purification, or (v) fusion of the polypeptide with another compound, such as albumin (including but not limited to recombinant albumin (see, e.g., U.S. Pat. No. 5,876,969, issued Mar. 2, 1999, EP Patent 0 413 622, and U.S. Pat. No. 5,766,883, issued Jun. 16, 1998, herein incorporated by reference in their entirety)). Such variant polypeptides are deemed to be within the scope of those skilled in the art from the teachings herein.

[0131] For example, polypeptide variants containing amino acid substitutions of charged amino acids with other charged or neutral amino acids may produce proteins with improved characteristics, such as less aggregation. Aggregation of pharmaceutical formulations both reduces activity and increases clearance due to the aggregate's immunogenic activity. See Pinckard et al., Clin. Exp. Immunol. 2:331-340 (1967); Robbins et al., Diabetes 36: 838-845 (1987); Cleland et al., Crit. Rev. Therapeutic Drug Carrier Systems 10:307-377 (1993).

[0132] A further embodiment of the invention relates to polypeptides which comprise the amino acid sequence of a polypeptide having an amino acid sequence which contains at least one amino acid substitution, but not more than 50 amino acid substitutions, even more preferably, not more than 40 amino acid substitutions, still more preferably, not more than 30 amino acid substitutions, and still even more preferably, not more than 20 amino acid substitutions from a polypeptide sequence disclosed herein. Of course it is highly preferable for a polypeptide to have an amino acid sequence which comprises the amino acid sequence of a polypeptide of SEQ ID NO:Y, an amino acid sequence encoded by SEQ ID NO:X, an amino acid sequence encoded by the portion of SEQ ID NO:X as defined in columnns 8 and 9 of Table 2, an amino acid sequence encoded by the complement of SEQ ID NO:X, and/or an amino acid sequence encoded by cDNA contained in Clone ID NO:Z which contains, in order of ever-increasing preference, at least one, but not more than 10, 9, 8, 7, 6, 5, 4, 3, 2 or 1 amino acid substitutions.

[0133] In specific embodiments, the polypeptides of the invention comprise, or alternatively, consist of, fragments or variants of a reference amino acid sequence selected from: (a) the amino acid sequence of SEQ ID NO:Y or fragments thereof (e.g., the mature form and/or other fragments described herein); (b) the amino acid sequence encoded by SEQ ID NO:X or fragments thereof, (c) the amino acid sequence encoded by the complement of SEQ ID NO:X or fragments thereof; (d) the amino acid sequence encoded by the portion of SEQ ID NO:X as defined in columns 8 and 9 of Table 2 or fragments thereof; and (e) the amino acid sequence encoded by cDNA contained in Clone ID NO:Z or fragments thereof; wherein the fragments or variants have 1-5, 5-10, 5-25, 5-50, 10-50 or 50-150, amino acid residue additions, substitutions, and/or deletions when compared to the reference amino acid sequence. In preferred embodiments, the amino acid substitutions are conservative. Polynucleotides encoding these polypeptides are also encompassed by the invention.

[0134] Polynucleotide and Polypeptide Fragments

[0135] The present invention is also directed to polynucleotide fragments of the polynucleotides (nucleic acids) of the invention. In the present invention, a “polynucleotide fragment” refers to a polynucleotide having a nucleic acid sequence which, for example: is a portion of the cDNA contained in Clone ID NO:Z or the complementary strand thereto; is a portion of the polynucleotide sequence encoding the polypeptide encoded by the cDNA contained in Clone ID NO:Z or the complementary strand thereto; is a portion of a polynucleotide sequence encoding the amino acid sequence encoded by the region of SEQ ID NO:X as defined in columns 8 and 9 of Table 2 or the complementary strand thereto; is a portion of the polynucleotide sequence of SEQ ID NO:X as defined in columns 8 and 9 of Table 2 or the complementary strand thereto; is a portion of the polynucleotide sequence in SEQ ID NO:X or the complementary strand thereto; is a polynucleotide sequence encoding a portion of the polypeptide of SEQ ID NO:Y; is a polynucleotide sequence encoding a portion of a polypeptide encoded by SEQ ID NO:X; is a polynucleotide sequence encoding a portion of a polypeptide encoded by the complement of the polynucleotide sequence in SEQ ID NO:X; is a portion of a polynucleotide sequence encoding the amino acid sequence encoded by the region of SEQ ID NO:B as defined in column 6 of Table 1B or the complementary strand thereto; or is a portion of the polynucleotide sequence of SEQ ID NO:B as defined in column 6 of Table 1B or the complementary strand thereto.

[0136] The polynucleotide fragments of the invention are preferably at least about 15 nt, and more preferably at least about 20 nt, still more preferably at least about 30 nt, and even more preferably, at least about 40 nt, at least about 50 nt, at least about 75 nt, or at least about 150 nt in length. A fragment “at least 20 nt in length,” for example, is intended to include 20 or more contiguous bases from the cDNA sequence contained in Clone ID NO:Z, or the nucleotide sequence shown in SEQ ID NO:X or the complementary stand thereto. In this context “about” includes the particularly recited value or a value larger or smaller by several (5, 4, 3, 2, or 1) nucleotides, at either terminus or at both termini. These nucleotide fragments have uses that include, but are not limited to, as diagnostic probes and primers as discussed herein. Of course, larger fragments (e.g., at least 160, 170, 180, 190, 200, 250, 500, 600, 1000, or 2000 nucleotides in length) are also encompassed by the invention.

[0137] Moreover, representative examples of polynucleotide fragments of the invention comprise, or alternatively consist of, a sequence from about nucleotide number 1-50, 51-100, 101-150, 151-200, 201-250, 251-300, 301-350, 351-400, 401-450, 451-500, 501-550, 551-600, 601-650, 651-700, 701-750, 751-800, 801-850, 851-900, 901-950, 951-1000, 1001-1050, 1051-1100, 1101-1150, 1151-1200, 1201-1250, 1251-1300, 1301-1350, 1351-1400, 1401-1450, 1451-1500, 1501-1550, 1551-1600, 1601-1650, 1651-1700, 1701-1750, 1751-1800, 1801-1850, 1851-1900, 1901-1950, 1951-2000, 2001-2050, 2051-2100, 2101-2150, 2151-2200, 2201-2250, 2251-2300, 2301-2350, 2351-2400, 2401-2450, 2451-2500, 2501-2550, 2551-2600, 2601-2650, 2651-2700, 2701-2750, 2751-2800, 2801-2850, 2851-2900, 2901-2950, 2951-3000, 3001-3050, 3051-3100, 3101-3150, 3151-3200, 3201-3250, 3251-3300, 3301-3350, 3351-3400, 3401-3450, 3451-3500, 3501-3550, 3551-3600, 3601-3650, 3651-3700, 3701-3750, 3751-3800, 3801-3850, 3851-3900, 3901-3950, 3951-4000, 4001-4050, 4051-4100, 4101-4150, 4151-4200, 4201-4250, 4251-4300, 4301-4350, 4351-4400, 4401-4450, 4451-4500, 4501-4550, 4551-4600, 4601-4650, 4651-4700, 4701-4750, 4751-4800, 4801-4850, 4851-4900, 4901-4950, 4951-5000, 5001-5050, 5051-5100, 5101-5150, 5151-5200, 5201-5250, 5251-5300, 5301-5350, 5351-5400, 5401-5450, 5451-5500, 5501-5550, 5551-5600, 5601-5650, 5651-5700, 5701-5750, 5751-5800, 5801-5850, 5851-5900, 5901-5950, 5951-6000, 6001-6050, 6051-6100, 6101-6150, 6151-6200, 6201-6250, 6251-6300, 6301-6350, 6351-6400, 6401-6450, 6451-6500, 6501-6550, 6551-6600, 6601-6650, 6651-6700, 6701-6750, 6751-6800, 6801-6850, 6851-6900, 6901-6950, 6951-7000, 7001-7050, 7051-7100, 7101-7150, 7151-7200, 7201-7250, 7251-7300 or 7301 to the end of SEQ ID NO:X, or the complementary strand thereto. In this context “about” includes the particularly recited range or a range larger or smaller by several (5, 4, 3, 2, or 1) nucleotides, at either terminus or at both termini. Preferably, these fragments encode a polypeptide which has a functional activity (e.g., biological activity). More preferably, these polynucleotides can be used as probes or primers as discussed herein. Polynucleotides which hybridize to one or more of these polynucleotides under stringent hybridization conditions or alternatively, under lower stringency conditions are also encompassed by the invention, as are polypeptides encoded by these polynucleotides.

[0138] Further representative examples of polynucleotide fragments of the invention comprise, or alternatively consist of, a sequence from about nucleotide number 1-50, 51-100, 101-150, 151-200, 201-250, 251-300, 301-350, 351-400, 401-450, 451-500, 501-550, 551-600, 601-650, 651-700, 701-750, 751-800, 801-850, 851-900, 901-950, 951-1000, 1001-1050, 1051-1100, 1101-1150, 1151-1200, 1201-1250, 1251-1300, 1301-1350, 1351-1400, 1401-1450, 1451-1500, 1501-1550, 1551-1600, 1601-1650, 1651-1700, 1701-1750, 1751-1800, 1801-1850, 1851-1900, 1901-1950, 1951-2000, 2001-2050, 2051-2100, 2101-2150, 2151-2200, 2201-2250, 2251-2300, 2301-2350, 2351-2400, 2401-2450, 2451-2500, 2501-2550, 2551-2600, 2601-2650, 2651-2700, 2701-2750, 2751-2800, 2801-2850, 2851-2900, 2901-2950, 2951-3000, 3001-3050, 3051-3100, 3101-3150, 3151-3200, 3201-3250, 3251-3300, 3301-3350, 3351-3400, 3401-3450, 3451-3500, 3501-3550, 3551-3600, 3601-3650, 3651-3700, 3701-3750, 3751-3800, 3801-3850, 3851-3900, 3901-3950, 3951-4000, 4001-4050, 4051-4100, 4101-4150, 4151-4200, 4201-4250, 4251-4300, 4301-4350, 4351-4400, 4401-4450, 4451-4500, 4501-4550, 4551-4600, 4601-4650, 4651-4700, 4701-4750, 4751-4800, 4801-4850, 4851-4900, 4901-4950, 4951-5000, 5001-5050, 5051-5100, 5101-5150, 5151-5200, 5201-5250, 5251-5300, 5301-5350, 5351-5400, 5401-5450, 5451-5500, 5501-5550, 5551-5600, 5601-5650, 5651-5700, 5701-5750, 5751-5800, 5801-5850, 5851-5900, 5901-5950, 5951-6000, 6001-6050, 6051-6100, 6101-6150, 6151-6200, 6201-6250, 6251-6300, 6301-6350, 6351-6400, 6401-6450, 6451-6500, 6501-6550, 6551-6600, 6601-6650, 6651-6700, 6701-6750, 6751-6800, 6801-6850, 6851-6900, 6901-6950, 6951-7000, 7001-7050, 7051-7100, 7101-7150, 7151-7200, 7201-7250, 7251-7300 or 7301 to the end of the cDNA sequence contained in Clone ID NO:Z, or the complementary strand thereto. In this context “about” includes the particularly recited range or a range larger or smaller by several (5, 4, 3, 2, or 1) nucleotides, at either terminus or at both termini. Preferably, these fragments encode a polypeptide which has a functional activity (e.g., biological activity). More preferably, these polynucleotides can be used as probes or primers as discussed herein. Polynucleotides which hybridize to one or more of these polynucleotides under stringent hybridization conditions or alternatively, under lower stringency conditions are also encompassed by the invention, as are polypeptides encoded by these polynucleotides.

[0139] Moreover, representative examples of polynucleotide fragments of the invention comprise, or alternatively consist of, a nucleic acid sequence comprising one, two, three, four, five, six, seven, eight, nine, ten, or more of the above described polynucleotide fragments of the invention in combination with a polynucleotide sequence delineated in Table 1B column 6. Additional, representative examples of polynucleotide fragments of the invention comprise, or alternatively consist of, a nucleic acid sequence comprising one, two, three, four, five, six, seven, eight, nine, ten, or more of the above described polynucleotide fragments of the invention in combination with a polynucleotide sequence that is the complementary strand of a sequence delineated in column 6 of Table 1B. In further embodiments, the above-described polynucleotide fragments of the invention comprise, or alternatively consist of, sequences delineated in Table 1B, column 6, and have a nucleic acid sequence which is different from that of the BAC fragment having the sequence disclosed in SEQ ID NO:B (see Table 1B, column 5). In additional embodiments, the above-described polynucleotide fragments of the invention comprise, or alternatively consist of, sequences delineated in Table 1B, column 6, and have a nucleic acid sequence which is different from that published for the BAC clone identified as BAC ID NO:A (see Table 1B, column 4). In additional embodiments, the above-described polynucleotides of the invention comprise, or alternatively consist of, sequences delineated Table 1B, column 6, and have a nucleic acid sequence which is different from that contained in the BAC clone identified as BAC ID NO:A (see Table 1B, column 4). Polypeptides encoded by these polynucleotides, other polynucleotides that encode these polypeptides, and antibodies that bind these polypeptides are also encompassed by the invention. Additionally, fragments and variants of the above-described polynucleotides and polypeptides are also encompassed by the invention.

[0140] In additional specific embodiments, polynucleotides of the invention comprise, or alternatively consist of, one, two, three, four, five, six, seven, eight, nine, ten, or more fragments of the sequences delineated in column 6 of Table 1B, and the polynucleotide sequence of SEQ ID NO:X (e.g., as defined in Table 1B, column 2) or fragments or variants thereof. Polypeptides encoded by these polynucleotides, other polynucleotides that encode these polypeptides, and antibodies that bind these polypeptides are also encompassed by the invention.

[0141] In additional specific embodiments, polynucleotides of the invention comprise, or alternatively consist of, one, two, three, four, five, six, seven, eight, nine, ten, or more fragments of the sequences delineated in column 6 of Table 1B which correspond to the same Clone ID NO:Z (see Table 1B, column 1), and the polynucleotide sequence of SEQ ID NO:X (e.g., as defined in Table 1A or 1B) or fragments or variants thereof. Polypeptides encoded by these polynucleotides, other polynucleotides that encode these polypeptides, and antibodies that bind these polypeptides are also encompassed by the invention.

[0142] In further specific embodiments, polynucleotides of the invention comprise, or alternatively consist of, one, two, three, four, five, six, seven, eight, nine, ten, or more fragments of the sequences delineated in the same row of column 6 of Table 1B, and the polynucleotide sequence of SEQ ID NO:X (e.g., as defined in Table 1A or 1B) or fragments or variants thereof. Polypeptides encoded by these polynucleotides, other polynucleotides that encode these polypeptides, and antibodies that bind these polypeptides are also encompassed by the invention.

[0143] In additional specific embodiments, polynucleotides of the invention comprise, or alternatively consist of a polynucleotide sequence in which the 3′ 10 polynucleotides of one of the sequences delineated in column 6 of Table 1B and the 5′ 10 polynucleotides of the sequence of SEQ ID NO:X are directly contiguous. Nucleic acids which hybridize to the complement of these 20 contiguous polynucleotides under stringent hybridization conditions or alternatively, under lower stringency conditions, are also encompassed by the invention. Polypeptides encoded by these polynucleotides and/or nucleic acids, other polynucleotides and/or nucleic acids that encode these polypeptides, and antibodies that bind these polypeptides are also encompassed by the invention. Additionally, fragments and variants of the above-described polynucleotides, nucleic acids, and polypeptides are also encompassed by the invention.

[0144] In additional specific embodiments, polynucleotides of the invention comprise, or alternatively consist of a polynucleotide sequence in which the 3′ 10 polynucleotides of one of the sequences delineated in column 6 of Table 1B and the 5′ 10 polynucleotides of a fragment or variant of the sequence of SEQ ID NO:X (e.g., as described herein) are directly contiguous Nucleic acids which hybridize to the complement of these 20 contiguous polynucleotides under stringent hybridization conditions or alternatively, under lower stringency conditions, are also encompassed by the invention. Polypeptides encoded by these polynucleotides and/or nucleic acids, other polynucleotides and/or nucleic acids encoding these polypeptides, and antibodies that bind these polypeptides are also encompassed by the invention. Additionally, fragments and variants of the above-described polynucleotides, nucleic acids, and polypeptides are also encompassed by the invention.

[0145] In further specific embodiments, polynucleotides of the invention comprise, or alternatively consist of a polynucleotide sequence in which the 3′ 10 polynucleotides of a fragment or variant of the sequence of SEQ ID NO:X and the 5′ 10 polynucleotides of the sequence of one of the sequences delineated in column 6 of Table 1B are directly contiguous. Nucleic acids which hybridize to the complement of these 20 contiguous polynucleotides under stringent hybridization conditions or alternatively, under lower stringency conditions, are also encompassed by the invention. Polypeptides encoded by these polynucleotides and/or nucleic acids, other polynucleotides and/or nucleic acids encoding these polypeptides, and antibodies that bind these polypeptides are also encompassed by the invention. Additionally, fragments and variants of the above-described polynucleotides, nucleic acids, and polypeptides are also encompassed by the invention.

[0146] In specific embodiments, polynucleotides of the invention comprise, or alternatively consist of a polynucleotide sequence in which the 3′ 10 polynucleotides of one of the sequences delineated in column 6 of Table 1B and the 5′ 10 polynucleotides of another sequence in column 6 are directly contiguous. In preferred embodiments, the 3′ 10 polynucleotides of one of the sequences delineated in column 6 of Table 1B is directly contiguous with the 5′ 10 polynucleotides of the next sequential exon delineated in Table 1B, column 6. Nucleic acids which hybridize to the complement of these 20 contiguous polynucleotides under stringent hybridization conditions or alternatively, under lower stringency conditions, are also encompassed by the invention. Polypeptides encoded by these polynucleotides and/or nucleic acids, other polynucleotides and/or nucleic acids encoding these polypeptides, and antibodies that bind these polypeptides are also encompassed by the invention. Additionally, fragments and variants of the above-described polynucleotides, nucleic acids, and polypeptides are also encompassed by the invention.

[0147] In the present invention, a “polypeptide fragment” refers to an amino acid sequence which is a portion of that contained in SEQ ID NO:Y, a portion of an amino acid sequence encoded by the portion of SEQ ID NO:X as defined in columnns 8 and 9 of Table 2, a portion of an amino acid sequence encoded by the polynucleotide sequence of SEQ ID NO:X, a portion of an amino acid sequence encoded by the complement of the polynucleotide sequence in SEQ ID NO:X, and/or a portion of an amino acid sequence encoded by the cDNA contained in Clone ID NO:Z. Protein (polypeptide) fragments may be “free-standing,” or comprised within a larger polypeptide of which the fragment forms a part or region, most preferably as a single continuous region. Representative examples of polypeptide fragments of the invention, include, for example, fragments comprising, or alternatively consisting of, from about amino acid number 1-20, 21-40, 41-60, 61-80, 81-100, 101-120, 121-140, 141-160, 161-180, 181-200, 201-220, 221-240, 241-260, 261-280, 281-300, 301-320, 321-340, 341-360, 361-380, 381-400, 401-420, 421-440, 441-460, 461-480, 481-500, 501-520, 521-540, 541-560, 561-580, 581-600, 601-620, 621-640, 641-660, 661-680, 681-700, 701-720, 721-740, 741-760, 761-780, 781-800, 801-820, 821-840, 841-860, 861-880, 881-900, 901-920, 921-940, 941-960, 961-980, 981-1000, 1001-1020, 1021-1040, 1041-1060, 1061-1080, 1081-1100, 1101-1120, 1121-1140, 1141-1160, 1161-1180, 1181-1200, 1201-1220, 1221-1240, 1241-1260, 1261-1280, 1281-1300, 1301-1320, 1321-1340, 1341-1360, 1361-1380, 1381-1400, 1401-1420, 1421-1440, or 1441 to the end of the coding region of cDNA and SEQ ID NO: Y. In a preferred embodiment, polypeptide fragments of the invention include, for example, fragments comprising, or alternatively consisting of, from about amino acid number 1-20, 21-40, 41-60, 61-80, 81-100, 101-120, 121-140, 141-160, 161-180, 181-200, 201-220, 221-240, 241-260, 261-280, 281-300, 301-320, 321-340, 341-360, 361-380, 381-400, 401-420, 421-440, 441-460, 461-480, 481-500, 501-520, 521-540, 541-560, 561-580, 581-600, 601-620, 621-640, 641-660, 661-680, 681-700, 701-720, 721-740, 741-760, 761-780, 781-800, 801-820, 821-840, 841-860, 861-880, 881-900, 901-920, 921-940, 941-960, 961-980, 981-1000, 1001-1020, 1021-1040, 1041-1060, 1061-1080, 1081-1100, 1101-1120, 1121-1140, 1141-1160, 1161-1180, 1181-1200, 1201-1220, 1221-1240, 1241-1260, 1261-1280, 1281-1300, 1301-1320, 1321-1340, 1341-1360, 1361-1380, 1381-1400, 1401-1420, 1421-1440, or 1441 to the end of the coding region of SEQ ID NO:Y. Moreover, polypeptide fragments of the invention may be at least about 10, 15, 20, 25, 30, 35, 40, 45, 50, 55, 60, 65, 70, 75, 80, 85, 90, 100, 110, 120, 130, 140, or 150 amino acids in length. In this context “about” includes the particularly recited ranges or values, or ranges or values larger or smaller by several (5, 4, 3, 2, or 1) amino acids, at either extreme or at both extremes. Polynucleotides encoding these polypeptide fragments are also encompassed by the invention.

[0148] Even if deletion of one or more amino acids from the N-terminus of a protein results in modification of loss of one or more biological functions of the protein, other functional activities (e.g., biological activities, ability to multimerize, ability to bind a ligand) may still be retained. For example, the ability of shortened muteins to induce and/or bind to antibodies which recognize the complete or mature forms of the polypeptides generally will be retained when less than the majority of the residues of the complete or mature polypeptide are removed from the N-terminus. Whether a particular polypeptide lacking N-terminal residues of a complete polypeptide retains such immunologic activities can readily be determined by routine methods described herein and otherwise known in the art. It is not unlikely that a mutein with a large number of deleted N-terminal amino acid residues may retain some biological or immunogenic activities. In fact, peptides composed of as few as six amino acid residues may often evoke an immune response.

[0149] Accordingly, polypeptide fragments include the secreted protein as well as the mature form. Further preferred polypeptide fragments include the secreted protein or the mature form having a continuous series of deleted residues from the amino or the carboxy terminus, or both. For example, any number of amino acids, ranging from 1-60, can be deleted from the amino terminus of either the secreted polypeptide or the mature form. Similarly, any number of amino acids, ranging from 1-30, can be deleted from the carboxy terminus of the secreted protein or mature form. Furthermore, any combination of the above amino and carboxy terminus deletions are preferred. Similarly, polynucleotides encoding these polypeptide fragments are also preferred.

[0150] The present invention further provides polypeptides having one or more residues deleted from the amino terminus of the amino acid sequence of a polypeptide disclosed herein (e.g., a polypeptide of SEQ ID NO:Y, a polypeptide encoded by the polynucleotide sequence contained in SEQ ID NO:X or the complement thereof, a polypeptide encoded by the portion of SEQ ID NO:X as defined in columns 8 and 9 of Table 2, a polypeptide encoded by the portion of SEQ ID NO:B as defined in column 6 of Table 1B, and/or a polypeptide encoded by the cDNA contained in Clone ID NO:Z). In particular, N-terminal deletions may be described by the general formula m−q, where q is a whole integer representing the total number of amino acid residues in a polypeptide of the invention (e.g., the polypeptide disclosed in SEQ ID NO:Y, or the polypeptide encoded by the portion of SEQ ID NO:X as defined in columns 8 and 9 of Table 2), and m is defined as any integer ranging from 2 to q−6. Polynucleotides encoding these polypeptides are also encompassed by the invention.

[0151] The present invention further provides polypeptides having one or more residues from the carboxy terminus of the amino acid sequence of a polypeptide disclosed herein (e.g., a polypeptide of SEQ ID NO:Y, a polypeptide encoded by the polynucleotide sequence contained in SEQ ID NO:X, a polypeptide encoded by the portion of SEQ ID NO:X as defined in columns 8 and 9 of Table 2, and/or a polypeptide encoded by the cDNA contained in Clone ID NO:Z). In particular, C-terminal deletions may be described by the general formula 1−n, where n is any whole integer ranging from 6 to q−1, and where n corresponds to the position of amino acid residue in a polypeptide of the invention. Polynucleotides encoding these polypeptides are also encompassed by the invention.

[0152] In addition, any of the above described N- or C-terminal deletions can be combined to produce a N- and C-terminal deleted polypeptide. The invention also provides polypeptides having one or more amino acids deleted from both the amino and the carboxyl termini, which may be described generally as having residues m-n of a polypeptide encoded by SEQ ID NO:X (e.g., including, but not limited to, the preferred polypeptide disclosed as SEQ ID NO:Y and the polypeptide encoded by the portion of SEQ ID NO:X as defined in columns 8 and 9 of Table 2), the cDNA contained in Clone ID NO:Z, and/or the complement thereof, where n and m are integers as described above. Polynucleotides encoding these polypeptides are also encompassed by the invention.

[0153] Also as mentioned above, even if deletion of one or more amino acids from the C-terminus of a protein results in modification of loss of one or more biological functions of the protein, other functional activities (e.g., biological activities, ability to multimerize, ability to bind a ligand) may still be retained. For example the ability of the shortened mutein to induce and/or bind to antibodies which recognize the complete or mature forms of the polypeptide generally will be retained when less than the majority of the residues of the complete or mature polypeptide are removed from the C-terminus. Whether a particular polypeptide lacking C-terminal residues of a complete polypeptide retains such immunologic activities can readily be determined by routine methods described herein and otherwise known in the art. It is not unlikely that a mutein with a large number of deleted C-terminal amino acid residues may retain some biological or immunogenic activities. In fact, peptides composed of as few as six amino acid residues may often evoke an immune response.

[0154] The present application is also directed to proteins containing polypeptides at least 80%, 85%, 90%, 95%, 96%, 97%, 98% or 99% identical to a polypeptide sequence set forth herein. In preferred embodiments, the application is directed to proteins containing polypeptides at least 80%, 85%, 90%, 95%, 96%, 97%, 98% or 99% identical to polypeptides having the amino acid sequence of the specific N- and C-terminal deletions. Polynucleotides encoding these polypeptides are also encompassed by the invention.

[0155] Any polypeptide sequence encoded by, for example, the polynucleotide sequences set forth as SEQ ID NO:X or the complement thereof, (presented, for example, in Tables 1A and 2), the cDNA contained in Clone ID NO:Z, or the polynucleotide sequence as defined in column 6 of Table 1B, may be analyzed to determine certain preferred regions of the polypeptide. For example, the amino acid sequence of a polypeptide encoded by a polynucleotide sequence of SEQ ID NO:X (e.g., the polypeptide of SEQ ID NO:Y and the polypeptide encoded by the portion of SEQ ID NO:X as defined in columnns 8 and 9 of Table 2) or the cDNA contained in Clone ID NO:Z may be analyzed using the default parameters of the DNASTAR computer algorithm (DNASTAR, Inc., 1228 S. Park St., Madison, Wis. 53715 USA; http://www.dnastar.com/).

[0156] Polypeptide regions that may be routinely obtained using the DNASTAR computer algorithm include, but are not limited to, Garnier-Robson alpha-regions, beta-regions, turn-regions, and coil-regions; Chou-Fasman alpha-regions, beta-regions, and turn-regions; Kyte-Doolittle hydrophilic regions and hydrophobic regions; Eisenberg alpha-and beta-amphipathic regions; Karplus-Schulz flexible regions; Emini surface-forming regions; and Jameson-Wolf regions of high antigenic index. Among highly preferred polynucleotides of the invention in this regard are those that encode polypeptides comprising regions that combine several structural features, such as several (e.g., 1, 2, 3 or 4) of the features set out above.

[0157] Additionally, Kyte-Doolittle hydrophilic regions and hydrophobic regions, Emini surface-forming regions, and Jameson-Wolf regions of high antigenic index (i.e., containing four or more contiguous amino acids having an antigenic index of greater than or equal to 1.5, as identified using the default parameters of the Jameson-Wolf program) can routinely be used to determine polypeptide regions that exhibit a high degree of potential for antigenicity. Regions of high antigenicity are determined from data by DNASTAR analysis by choosing values which represent regions of the polypeptide which are likely to be exposed on the surface of the polypeptide in an environment in which antigen recognition may occur in the process of initiation of an immune response.

[0158] Preferred polypeptide fragments of the invention are fragments comprising, or alternatively, consisting of, an amino acid sequence that displays a functional activity (e.g. biological activity) of the polypeptide sequence of which the amino acid sequence is a fragment. By a polypeptide displaying a “functional activity” is meant a polypeptide capable of one or more known functional activities associated with a full-length protein, such as, for example, biological activity, antigenicity, immunogenicity, and/or multimerization, as described herein.

[0159] Other preferred polypeptide fragments are biologically active fragments. Biologically active fragments are those exhibiting activity similar, but not necessarily identical, to an activity of the polypeptide of the present invention. The biological activity of the fragments may include an improved desired activity, or a decreased undesirable activity.

[0160] In preferred embodiments, polypeptides of the invention comprise, or alternatively consist of, one, two, three, four, five or more of the antigenic fragments of the polypeptide of SEQ ID NO:Y, or portions thereof. Polynucleotides encoding these polypeptides are also encompassed by the invention.

[0161] The present invention encompasses polypeptides comprising, or alternatively consisting of, an epitope of: the polypeptide sequence shown in SEQ ID NO:Y; a polypeptide sequence encoded by SEQ ID NO:X or the complementary strand thereto; the polypeptide sequence encoded by the portion of SEQ ID NO:X as defined in columns 8 and 9 of Table 2; the polypeptide sequence encoded by the portion of SEQ ID NO:B as defined in column 6 of Table 1B or the complement thereto; the polypeptide sequence encoded by the cDNA contained in Clone ID NO:Z; or the polypeptide sequence encoded by a polynucleotide that hybridizes to the sequence of SEQ ID NO:X, the complement of the sequence of SEQ ID NO:X, the complement of a portion of SEQ ID NO:X as defined in columns 8 and 9 of Table 2, or the cDNA sequence contained in Clone ID NO:Z under stringent hybridization conditions or alternatively, under lower stringency hybridization as defined supra. The present invention further encompasses polynucleotide sequences encoding an epitope of a polypeptide sequence of the invention (such as, for example, the sequence disclosed in SEQ ID NO:X, or a fragment thereof), polynucleotide sequences of the complementary strand of a polynucleotide sequence encoding an epitope of the invention, and polynucleotide sequences which hybridize to the complementary strand under stringent hybridization conditions or alternatively, under lower stringency hybridization conditions defined supra.

[0162] The term “epitopes,” as used herein, refers to portions of a polypeptide having antigenic or immunogenic activity in an animal, preferably a mammal, and most preferably in a human. In a preferred embodiment, the present invention encompasses a polypeptide comprising an epitope, as well as the polynucleotide encoding this polypeptide. An “immunogenic epitope,” as used herein, is defined as a portion of a protein that elicits an antibody response in an animal, as determined by any method known in the art, for example, by the methods for generating antibodies described infra. (See, for example, Geysen et al., Proc. Natl. Acad. Sci. USA 81:3998-4002 (1983)). The term “antigenic epitope,” as used herein, is defined as a portion of a protein to which an antibody can immunospecifically bind its antigen as determined by any method well known in the art, for example, by the immunoassays described herein. Immunospecific binding excludes non-specific binding but does not necessarily exclude cross-reactivity with other antigens. Antigenic epitopes need not necessarily be immunogenic.

[0163] Fragments which function as epitopes may be produced by any conventional means. (See, e.g., Houghten, R. A., Proc. Natl. Acad. Sci. USA 82:5131-5135 (1985) further described in U.S. Pat. No. 4,631,211.)

[0164] In the present invention, antigenic epitopes preferably contain a sequence of at least 4, at least 5, at least 6, at least 7, more preferably at least 8, at least 9, at least 10, at least 11, at least 12, at least 13, at least 14, at least 15, at least 20, at least 25, at least 30, at least 40, at least 50, and, most preferably, between about 15 to about 30 amino acids. Preferred polypeptides comprising immunogenic or antigenic epitopes are at least 10, 15, 20, 25, 30, 35, 40, 45, 50, 55, 60, 65, 70, 75, 80, 85, 90, 95, or 100 amino acid residues in length. Additional non-exclusive preferred antigenic epitopes include the antigenic epitopes disclosed herein, as well as portions thereof. Antigenic epitopes are useful, for example, to raise antibodies, including monoclonal antibodies, that specifically bind the epitope. Preferred antigenic epitopes include the antigenic epitopes disclosed herein, as well as any combination of two, three, four, five or more of these antigenic epitopes. Antigenic epitopes can be used as the target molecules in immunoassays. (See, for instance, Wilson et al., Cell 37:767-778 (1984); Sutcliffe et al., Science 219:660-666 (1983)).

[0165] Non-limiting examples of epitopes of polypeptides that can be used to generate antibodies of the invention include a polypeptide comprising, or alternatively consisting of, at least one, two, three, four, five, six or more of the portion(s) of SEQ ID NO:Y specified in column 7 of Table 1A. These polypeptide fragments have been determined to bear antigenic epitopes of the proteins of the invention by the analysis of the Jameson-Wolf antigenic index which is included in the DNAStar suite of computer programs. By “comprise” it is intended that a polypeptide contains at least one, two, three, four, five, six or more of the portion(s) of SEQ ID NO:Y shown in column 7 of Table 1A, but it may contain additional flanking residues on either the amino or carboxyl termini of the recited portion. Such additional flanking sequences are preferably sequences naturally found adjacent to the portion; i.e., contiguous sequence shown in SEQ ID NO:Y. The flanking sequence may, however, be sequences from a heterolgous polypeptide, such as from another protein described herein or from a heterologous polypeptide not described herein. In particular embodiments, epitope portions of a polypeptide of the invention comprise one, two, three, or more of the portions of SEQ ID NO:Y shown in column 7 of Table 1A.

[0166] Similarly, immunogenic epitopes can be used, for example, to induce antibodies according to methods well known in the art. See, for instance, Sutcliffe et al., supra; Wilson et al., supra; Chow et al., Proc. Natl. Acad. Sci. USA 82:910-914; and Bittle et al., J. Gen. Virol. 66:2347-2354 (1985). Preferred immunogenic epitopes include the immunogenic epitopes disclosed herein, as well as any combination of two, three, four, five or more of these immunogenic epitopes. The polypeptides comprising one or more immunogenic epitopes may be presented for eliciting an antibody response together with a carrier protein, such as an albumin, to an animal system (such as rabbit or mouse), or, if the polypeptide is of sufficient length (at least about 25 amino acids), the polypeptide may be presented without a carrier. However, immunogenic epitopes comprising as few as 8 to 10 amino acids have been shown to be sufficient to raise antibodies capable of binding to, at the very least, linear epitopes in a denatured polypeptide (e.g., in Western blotting).

[0167] Epitope-bearing polypeptides of the present invention may be used to induce antibodies according to methods well known in the art including, but not limited to, in vivo immunization, in vitro immunization, and phage display methods. See, e.g., Sutcliffe et al., supra; Wilson et al., supra, and Bittle et al., J. Gen. Virol., 66:2347-2354 (1985). If in vivo immunization is used, animals may be immunized with free peptide; however, anti-peptide antibody titer may be boosted by coupling the peptide to a macromolecular carrier, such as keyhole limpet hemacyanin (KLH) or tetanus toxoid. For instance, peptides containing cysteine residues may be coupled to a carrier using a linker such as maleimidobenzoyl- N-hydroxysuccinimide ester (MBS), while other peptides may be coupled to carriers using a more general linking agent such as glutaraldehyde. Animals such as rabbits, rats and mice are immunized with either free or carrier- coupled peptides, for instance, by intraperitoneal and/or intradermal injection of emulsions containing about 100 μg of peptide or carrier protein and Freund's adjuvant or any other adjuvant known for stimulating an immune response. Several booster injections may be needed, for instance, at intervals of about two weeks, to provide a useful titer of anti-peptide antibody which can be detected, for example, by ELISA assay using free peptide adsorbed to a solid surface. The titer of anti-peptide antibodies in serum from an immunized animal may be increased by selection of anti-peptide antibodies, for instance, by adsorption to the peptide on a solid support and elution of the selected antibodies according to methods well known in the art.

[0168] As one of skill in the art will appreciate, and as discussed above, the polypeptides of the present invention (e.g., those comprising an immunogenic or antigenic epitope) can be fused to heterologous polypeptide sequences. For example, polypeptides of the present invention (including fragments or variants thereof), may be fused with the constant domain of immunoglobulins (IgA, IgE, IgG, IgM), or portions thereof (CH1, CH2, CH3, or any combination thereof and portions thereof, resulting in chimeric polypeptides. By way of another non-limiting example, polypeptides and/or antibodies of the present invention (including fragments or variants thereof) may be fused with albumin (including but not limited to recombinant human serum albumin or fragments or variants thereof (see, e.g., U.S. Pat. No. 5,876,969, issued Mar. 2, 1999, EP Patent 0 413 622, and U.S. Pat. No. 5,766,883, issued Jun. 16, 1998, herein incorporated by reference in their entirety)). In a preferred embodiment, polypeptides and/or antibodies of the present invention (including fragments or variants thereof) are fused with the mature form of human serum albumin (i.e., amino acids 1-585 of human serum albumin as shown in FIGS. 1 and 2 of EP Patent 0 322 094) which is herein incorporated by reference in its entirety. In another preferred embodiment, polypeptides and/or antibodies of the present invention (including fragments or variants thereof) are fused with polypeptide fragments comprising, or alternatively consisting of, amino acid residues 1−z of human serum albumin, where z is an integer from 369 to 419, as described in U.S. Pat. No. 5,766,883 herein incorporated by reference in its entirety. Polypeptides and/or antibodies of the present invention (including fragments or variants thereof) may be fused to either the N- or C-terminal end of the heterologous protein (e.g., immunoglobulin Fc polypeptide or human serum albumin polypeptide). Polynucleotides encoding fusion proteins of the invention are also encompassed by the invention.

[0169] Such fusion proteins as those described above may facilitate purification and may increase half-life in vivo. This has been shown for chimeric proteins consisting of the first two domains of the human CD4-polypeptide and various domains of the constant regions of the heavy or light chains of mammalian immunoglobulins. See, e.g., EP 394,827; Traunecker et al., Nature, 331:84-86 (1988). Enhanced delivery of an antigen across the epithelial barrier to the immune system has been demonstrated for antigens (e.g., insulin) conjugated to an FcRn binding partner such as IgG or Fc fragments (see, e.g., PCT Publications WO 96/22024 and WO 99/04813). IgG fusion proteins that have a disulfide-linked dimeric structure due to the IgG portion desulfide bonds have also been found to be more efficient in binding and neutralizing other molecules than monomeric polypeptides or fragments thereof alone. See, e.g., Fountoulakis et al., J. Biochem., 270:3958-3964 (1995). Nucleic acids encoding the above epitopes can also be recombined with a gene of interest as an epitope tag (e.g., the hemagglutinin (HA) tag or flag tag) to aid in detection and purification of the expressed polypeptide. For example, a system described by Janknecht et al. allows for the ready purification of non-denatured fusion proteins expressed in human cell lines (Janknecht et al., 1991, Proc. Natl. Acad. Sci. USA 88:8972-897). In this system, the gene of interest is subcloned into a vaccinia recombination plasmid such that the open reading frame of the gene is translationally fused to an amino-terminal tag consisting of six histidine residues. The tag serves as a matrix binding domain for the fusion protein. Extracts from cells infected with the recombinant vaccinia virus are loaded onto Ni2+ nitriloacetic acid-agarose column and histidine-tagged proteins can be selectively eluted with imidazole-containing buffers.

[0170] Fusion Proteins

[0171] Any polypeptide of the present invention can be used to generate fusion proteins. For example, the polypeptide of the present invention, when fused to a second protein, can be used as an antigenic tag. Antibodies raised against the polypeptide of the present invention can be used to indirectly detect the second protein by binding to the polypeptide. Moreover, because secreted proteins target cellular locations based on trafficking signals, polypeptides of the present invention which are shown to be secreted can be used as targeting molecules once fused to other proteins.

[0172] Examples of domains that can be fused to polypeptides of the present invention include not only heterologous signal sequences, but also other heterologous functional regions. The fusion does not necessarily need to be direct, but may occur through linker sequences.

[0173] In certain preferred embodiments, proteins of the invention are fusion proteins comprising an amino acid sequence that is an N and/or C- terminal deletion of a polypeptide of the invention. In preferred embodiments, the invention is directed to a fusion protein comprising an amino acid sequence that is at least 90%, 95%, 96%, 97%, 98% or 99% identical to a polypeptide sequence of the invention. Polynucleotides encoding these proteins are also encompassed by the invention.

[0174] Moreover, fusion proteins may also be engineered to improve characteristics of the polypeptide of the present invention. For instance, a region of additional amino acids, particularly charged amino acids, may be added to the N-terminus of the polypeptide to improve stability and persistence during purification from the host cell or subsequent handling and storage. Also, peptide moieties may be added to the polypeptide to facilitate purification. Such regions may be removed prior to final preparation of the polypeptide. The addition of peptide moieties to facilitate handling of polypeptides are familiar and routine techniques in the art.

[0175] As one of skill in the art will appreciate that, as discussed above, polypeptides of the present invention, and epitope-bearing fragments thereof, can be combined with heterologous polypeptide sequences. For example, the polypeptides of the present invention may be fused with heterologous polypeptide sequences, for example, the polypeptides of the present invention may be fused with the constant domain of immunoglobulins (IgA, IgE, IgG, IgM) or portions thereof (CH1, CH2, CH3, and any combination thereof, including both entire domains and portions thereof), or albumin (including, but not limited to, native or recombinant human albumin or fragments or variants thereof (see, e.g., U.S. Pat. No. 5,876,969, issued Mar. 2, 1999, EP Patent 0 413 622, and U.S. Pat. No. 5,766,883, issued Jun. 16, 1998, herein incorporated by reference in their entirety)), resulting in chimeric polypeptides. For example, EP-A-O 464 533 (Canadian counterpart 2045869) discloses fusion proteins comprising various portions of constant region of immunoglobulin molecules together with another human protein or part thereof. In many cases, the Fc part in a fusion protein is beneficial in therapy and diagnosis, and thus can result in, for example, improved pharmacokinetic properties (EP-A 0232 262). Alternatively, deleting the Fc part after the fusion protein has been expressed, detected, and purified, would be desired. For example, the Fc portion may hinder therapy and diagnosis if the fusion protein is used as an antigen for immunizations. In drug discovery, for example, human proteins, such as hIL-5, have been fused with Fc portions for the purpose of high-throughput screening assays to identify antagonists of hIL-5. See, D. Bennett et al., J. Molecular Recognition 8:52-58 (1995); K. Johanson et al., J. Biol. Chem. 270:9459-9471 (1995).

[0176] Moreover, the polypeptides of the present invention can be fused to marker sequences, such as a polypeptide which facilitates purification of the fused polypeptide. In preferred embodiments, the marker amino acid sequence is a hexa-histidine peptide, such as the tag provided in a pQE vector (QIAGEN, Inc., 9259 Eton Avenue, Chatsworth, Calif., 91311), among others, many of which are commercially available. As described in Gentz et al., Proc. Natl. Acad. Sci. USA 86:821-824 (1989), for instance, hexa-histidine provides for convenient purification of the fusion protein. Another peptide tag useful for purification, the “HA” tag, corresponds to an epitope derived from the influenza hemagglutinin protein (Wilson et al., Cell 37:767 (1984)).

[0177] Additional fusion proteins of the invention may be generated through the techniques of gene-shuffling, motif-shuffling, exon-shuffling, and/or codon-shuffling (collectively referred to as “DNA shuffling”). DNA shuffling may be employed to modulate the activities of polypeptides of the invention, such methods can be used to generate polypeptides with altered activity, as well as agonists and antagonists of the polypeptides. See, generally, U.S. Pat. Nos. 5,605,793; 5,811,238; 5,830,721; 5,834,252; and 5,837,458, and Patten et al., Curr. Opinion Biotechnol. 8:724-33 (1997); Harayama, Trends Biotechnol. 16(2):76-82 (1998); Hansson, et al., J. Mol. Biol. 287:265-76 (1999); and Lorenzo and Blasco, Biotechniques 24(2):308-13 (1998) (each of these patents and publications are hereby incorporated by reference in its entirety). In one embodiment, alteration of polynucleotides corresponding to SEQ ID NO:X and the polypeptides encoded by these polynucleotides may be achieved by DNA shuffling. DNA shuffling involves the assembly of two or more DNA segments by homologous or site-specific recombination to generate variation in the polynucleotide sequence. In another embodiment, polynucleotides of the invention, or the encoded polypeptides, may be altered by being subjected to random mutagenesis by error-prone PCR, random nucleotide insertion or other methods prior to recombination. In another embodiment, one or more components, motifs, sections, parts, domains, fragments, etc., of a polynucleotide encoding a polypeptide of the invention may be recombined with one or more components, motifs, sections, parts, domains, fragments, etc. of one or more heterologous molecules.

[0178] Thus, any of these above fusions can be engineered using the polynucleotides or the polypeptides of the present invention.

[0179] Recombinant and Synthetic Production of Polypeptides of the Invention

[0180] The present invention also relates to vectors containing the polynucleotide of the present invention, host cells, and the production of polypeptides by synthetic and recombinant techniques. The vector may be, for example, a phage, plasmid, viral, or retroviral vector. Retroviral vectors may be replication competent or replication defective. In the latter case, viral propagation generally will occur only in complementing host cells.

[0181] The polynucleotides of the invention may be joined to a vector containing a selectable marker for propagation in a host. Generally, a plasmid vector is introduced in a precipitate, such as a calcium phosphate precipitate, or in a complex with a charged lipid. If the vector is a virus, it may be packaged in vitro using an appropriate packaging cell line and then transduced into host cells.

[0182] The polynucleotide insert should be operatively linked to an appropriate promoter, such as the phage lambda PL promoter, the E. coli lac, trp, phoA and tac promoters, the SV40 early and late promoters and promoters of retroviral LTRs, to name a few. Other suitable promoters will be known to the skilled artisan. The expression constructs will further contain sites for transcription initiation, termination, and, in the transcribed region, a ribosome binding site for translation. The coding portion of the transcripts expressed by the constructs will preferably include a translation initiating codon at the beginning and a termination codon (UAA, UGA or UAG) appropriately positioned at the end of the polypeptide to be translated.

[0183] As indicated, the expression vectors will preferably include at least one selectable marker. Such markers include dihydrofolate reductase, G418, glutamine synthase, or neomycin resistance for eukaryotic cell culture, and tetracycline, kanamycin or ampicillin resistance genes for culturing in E. coli and other bacteria. Representative examples of appropriate hosts include, but are not limited to, bacterial cells, such as E. coli, Streptomyces and Salmonella typhimurium cells; fungal cells, such as yeast cells (e.g., Saccharomyces cerevisiae or Pichia pastoris (ATCC Accession No. 201178)); insect cells such as Drosophila S2 and Spodoptera Sf9 cells; animal cells such as CHO, COS, 293, and Bowes melanoma cells; and plant cells. Appropriate culture mediums and conditions for the above-described host cells are known in the art.

[0184] Among vectors preferred for use in bacteria include pQE70, pQE60 and pQE-9, available from QIAGEN, Inc.; pBluescript vectors, Phagescript vectors, pNH8A, pNH16a, pNH18A, pNH46A, available from Stratagene Cloning Systems, Inc.; and ptrc99a, pKK223-3, pKK233-3, pDR540, pRIT5 available from Pharmacia Biotech, Inc. Among preferred eukaryotic vectors are pWLNEO, pSV2CAT, pOG44, pXT1 and pSG available from Stratagene; and pSVK3, pBPV, pMSG and pSVL available from Pharmacia. Preferred expression vectors for use in yeast systems include, but are not limited to pYES2, pYD1, pTEF1/Zeo, pYES2/GS, pPICZ, pGAPZ, pGAPZalph, pPIC9, pPIC3.5, pHIL-D2, pHIL-S1, pPIC3.5K, pPIC9K, and PAO815 (all available from Invitrogen, Carlbad, Calif.). Other suitable vectors will be readily apparent to the skilled artisan.

[0185] Vectors which use glutamine synthase (GS) or DHFR as the selectable markers can be amplified in the presence of the drugs methionine sulphoximine or methotrexate, respectively. An advantage of glutamine synthase based vectors are the availabilty of cell lines (e.g., the murine myeloma cell line, NSO) which are glutamine synthase negative. Glutamine synthase expression systems can also function in glutamine synthase expressing cells (e.g., Chinese Hamster Ovary (CHO) cells) by providing additional inhibitor to prevent the functioning of the endogenous gene. A glutamine synthase expression system and components thereof are detailed in PCT publications: WO87/04462; WO86/05807; WO89/01036; WO89/10404; and WO91/06657, which are hereby incorporated in their entireties by reference herein. Additionally, glutamine synthase expression vectors can be obtained from Lonza Biologics, Inc. (Portsmouth, N.H.). Expression and production of monoclonal antibodies using a GS expression system in murine myeloma cells is described in Bebbington et al., Bio/technology 10:169(1992) and in Biblia and Robinson Biotechnol. Prog. 11:1 (1995) which are herein incorporated by reference.

[0186] The present invention also relates to host cells containing the above-described vector constructs described herein, and additionally encompasses host cells containing nucleotide sequences of the invention that are operably associated with one or more heterologous control regions (e.g., promoter and/or enhancer) using techniques known of in the art. The host cell can be a higher eukaryotic cell, such as a mammalian cell (e.g., a human derived cell), or a lower eukaryotic cell, such as a yeast cell, or the host cell can be a prokaryotic cell, such as a bacterial cell. A host strain may be chosen which modulates the expression of the inserted gene sequences, or modifies and processes the gene product in the specific fashion desired. Expression from certain promoters can be elevated in the presence of certain inducers; thus expression of the genetically engineered polypeptide may be controlled. Furthermore, different host cells have characteristics and specific mechanisms for the translational and post-translational processing and modification (e.g., phosphorylation, cleavage) of proteins. Appropriate cell lines can be chosen to ensure the desired modifications and processing of the foreign protein expressed.

[0187] Introduction of the nucleic acids and nucleic acid constructs of the invention into the host cell can be effected by calcium phosphate transfection, DEAE-dextran mediated transfection, cationic lipid-mediated transfection, electroporation, transduction, infection, or other methods. Such methods are described in many standard laboratory manuals, such as Davis et al., Basic Methods In Molecular Biology (1986). It is specifically contemplated that the polypeptides of the present invention may in fact be expressed by a host cell lacking a recombinant vector.

[0188] In addition to encompassing host cells containing the vector constructs discussed herein, the invention also encompasses primary, secondary, and immortalized host cells of vertebrate origin, particularly mammalian origin, that have been engineered to delete or replace endogenous genetic material (e.g., the coding sequence), and/or to include genetic material (e.g., heterologous polynucleotide sequences) that is operably associated with polynucleotides of the invention, and which activates, alters, and/or amplifies endogenous polynucleotides. For example, techniques known in the art may be used to operably associate heterologous control regions (e.g., promoter and/or enhancer) and endogenous polynucleotide sequences via homologous recombination (see, e.g., U.S. Pat. No. 5,641,670, issued Jun. 24, 1997; International Publication Number WO 96/29411; International Publication Number WO 94/12650; Koller et al., Proc. Natl. Acad. Sci. USA 86:8932-8935 (1989); and Zijlstra et al., Nature 342:435-438 (1989), the disclosures of each of which are incorporated by reference in their entireties).

[0189] Polypeptides of the invention can be recovered and purified from recombinant cell cultures by well-known methods including ammonium sulfate or ethanol precipitation, acid extraction, anion or cation exchange chromatography, phosphocellulose chromatography, hydrophobic interaction chromatography, affinity chromatography, hydroxylapatite chromatography and lectin chromatography. Most preferably, high performance liquid chromatography (“HPLC”) is employed for purification.

[0190] Polypeptides of the present invention can also be recovered from: products purified from natural sources, including bodily fluids, tissues and cells, whether directly isolated or cultured; products of chemical synthetic procedures; and products produced by recombinant techniques from a prokaryotic or eukaryotic host, including, for example, bacterial, yeast, higher plant, insect, and mammalian cells. Depending upon the host employed in a recombinant production procedure, the polypeptides of the present invention may be glycosylated or may be non-glycosylated. In addition, polypeptides of the invention may also include an initial modified methionine residue, in some cases as a result of host-mediated processes. Thus, it is well known in the art that the N-terminal methionine encoded by the translation initiation codon generally is removed with high efficiency from any protein after translation in all eukaryotic cells. While the N-terminal methionine on most proteins also is efficiently removed in most prokaryotes, for some proteins, this prokaryotic removal process is inefficient, depending on the nature of the amino acid to which the N-terminal methionine is covalently linked.

[0191] In one embodiment, the yeast Pichia pastoris is used to express polypeptides of the invention in a eukaryotic system. Pichia pastoris is a methylotrophic yeast which can metabolize methanol as its sole carbon source. A main step in the methanol metabolization pathway is the oxidation of methanol to formaldehyde using O₂. This reaction is catalyzed by the enzyme alcohol oxidase. In order to metabolize methanol as its sole carbon source, Pichia pastoris must generate high levels of alcohol oxidase due, in part, to the relatively low affinity of alcohol oxidase for O₂. Consequently, in a growth medium depending on methanol as a main carbon source, the promoter region of one of the two alcohol oxidase genes (AOXI) is highly active. In the presence of methanol, alcohol oxidase produced from the AOXI gene comprises up to approximately 30% of the total soluble protein in Pichia pastoris. See Ellis, S. B., et al., Mol. Cell. Biol. 5:1111-21 (1985); Koutz, P. J, et al., Yeast 5:167-77 (1989); Tschopp, J. F., et al., Nucl. Acids Res. 15:3859-76 (1987). Thus, a heterologous coding sequence, such as, for example, a polynucleotide of the present invention, under the transcriptional regulation of all or part of the AOX1 regulatory sequence is expressed at exceptionally high levels in Pichia yeast grown in the presence of methanol.

[0192] In one example, the plasmid vector pPIC9K is used to express DNA encoding a polypeptide of the invention, as set forth herein, in a Pichea yeast system essentially as described in “Pichia Protocols: Methods in Molecular Biology,” D. R. Higgins and J. Cregg, eds. The Humana Press, Totowa, N.J., 1998. This expression vector allows expression and secretion of a polypeptide of the invention by virtue of the strong AOX1 promoter linked to the Pichia pastoris alkaline phosphatase (PHO) secretory signal peptide (i.e., leader) located upstream of a multiple cloning site.

[0193] Many other yeast vectors could be used in place of pPIC9K, such as, pYES2, pYD1, pTEF1/Zeo, pYES2/GS, pPICZ, pGAPZ, pGAPZalpha, pPIC9, pPIC3.5, pHIL-D2, pHIL-S1, pPIC3.5K, and PAO815, as one skilled in the art would readily appreciate, as long as the proposed expression construct provides appropriately located signals for transcription, translation, secretion (if desired), and the like, including an in-frame AUG as required.

[0194] In another embodiment, high-level expression of a heterologous coding sequence, such as, for example, a polynucleotide of the present invention, may be achieved by cloning the heterologous polynucleotide of the invention into an expression vector such as, for example, pGAPZ or pGAPZalpha, and growing the yeast culture in the absence of methanol.

[0195] In addition to encompassing host cells containing the vector constructs discussed herein, the invention also encompasses primary, secondary, and immortalized host cells of vertebrate origin, particularly mammalian origin, that have been engineered to delete or replace endogenous genetic material (e.g., coding sequence), and/or to include genetic material (e.g., heterologous polynucleotide sequences) that is operably associated with polynucleotides of the invention, and which activates, alters, and/or amplifies endogenous polynucleotides. For example, techniques known in the art may be used to operably associate heterologous control regions (e.g., promoter and/or enhancer) and endogenous polynucleotide sequences via homologous recombination (see, e.g., U.S. Pat. No. 5,641,670, issued Jun. 24, 1997; International Publication No. WO 96/29411, published Sep. 26, 1996; International Publication No. WO 94/12650, published Aug. 4, 1994; Koller et al., Proc. Natl. Acad. Sci. USA 86:8932-8935 (1989); and Zijlstra et al., Nature 342:435-438 (1989), the disclosures of each of which are incorporated by reference in their entireties).

[0196] In addition, polypeptides of the invention can be chemically synthesized using techniques known in the art (e.g., see Creighton, 1983, Proteins: Structures and Molecular Principles, W. H. Freeman & Co., N.Y., and Hunkapiller et al., Nature, 310:105-111 (1984)). For example, a polypeptide corresponding to a fragment of a polypeptide can be synthesized by use of a peptide synthesizer. Furthermore, if desired, nonclassical amino acids or chemical amino acid analogs can be introduced as a substitution or addition into the polypeptide sequence. Non-classical amino acids include, but are not limited to, to the D-isomers of the common amino acids, 2,4-diaminobutyric acid, a-amino isobutyric acid, 4-aminobutyric acid, Abu, 2-amino butyric acid, g-Abu, e-Ahx, 6-amino hexanoic acid, Aib, 2-amino isobutyric acid, 3-amino propionic acid, ornithine, norleucine, norvaline, hydroxyproline, sarcosine, citrulline, homocitrulline, cysteic acid, t-butylglycine, t-butylalanine, phenylglycine, cyclohexylalanine, b-alanine, fluoro-amino acids, designer amino acids such as b-methyl amino acids, Ca-methyl amino acids, Na-methyl amino acids, and amino acid analogs in general. Furthermore, the amino acid can be D (dextrorotary) or L (levorotary).

[0197] The invention encompasses polypeptides of the present invention which are differentially modified during or after translation, e.g., by glycosylation, acetylation, phosphorylation, amidation, derivatization by known protecting/blocking groups, proteolytic cleavage, linkage to an antibody molecule or other cellular ligand, etc. Any of numerous chemical modifications may be carried out by known techniques, including but not limited, to specific chemical cleavage by cyanogen bromide, trypsin, chymotrypsin, papain, V8 protease, NaBH₄; acetylation, formylation, oxidation, reduction; metabolic synthesis in the presence of tunicamycin; etc.

[0198] Additional post-translational modifications encompassed by the invention include, for example, e.g., N-linked or O-linked carbohydrate chains, processing of N-terminal or C-terminal ends), attachment of chemical moieties to the amino acid backbone, chemical modifications of N-linked or O-linked carbohydrate chains, and addition or deletion of an N-terminal methionine residue as a result of procaryotic host cell expression. The polypeptides may also be modified with a detectable label, such as an enzymatic, fluorescent, isotopic or affinity label to allow for detection and isolation of the protein.

[0199] Examples of suitable enzymes include horseradish peroxidase, alkaline phosphatase, beta-galactosidase, or acetylcholinesterase; examples of suitable prosthetic group complexes include streptavidin/biotin and avidin/biotin; examples of suitable fluorescent materials include umbelliferone, fluorescein, fluorescein isothiocyanate, rhodamine, dichlorotriazinylamine fluorescein, dansyl chloride or phycoerythrin; an example of a luminescent material includes luminol; examples of bioluminescent materials include luciferase, luciferin, and aequorin; and examples of suitable radioactive material include iodine (¹²¹I, ¹²³I, ¹²⁵I, ¹³¹I), carbon (¹⁴C), sulfuir (³⁵S), tritium (³H), indium (¹¹¹In, ¹¹²In, ^{113m}In, ^{115m}In), technetium (⁹⁹Tc, ^{99m}Tc), thallium (²⁰¹Ti), gallium (⁶⁸Ga, ⁶⁷Ga), palladium (¹⁰³Pd), molybdenum (⁹⁹Mo), xenon (¹³³Xe), fluorine (¹⁸F), ¹⁵³Sm, ¹⁷⁷Lu, ¹⁵⁹Gd, ¹⁴⁹Pm, ¹⁴⁰La, ¹⁷⁵Yb, ¹⁶⁶Ho, ⁹⁰y, ⁴⁷Sc, ¹⁸⁶Re, ¹⁸⁸Re, ¹⁴²Pr, ¹⁰⁵Rh, and ⁹⁷Ru.

[0200] In specific embodiments, a polypeptide of the present invention or fragment or variant thereof is attached to macrocyclic chelators that associate with radiometal ions, including but not limited to, ¹⁷⁷Lu, ⁹⁰y, ¹⁶⁶Ho, and ¹⁵³Sm, to polypeptides. In a preferred embodiment, the radiometal ion associated with the macrocyclic chelators is ¹¹¹In. In another preferred embodiment, the radiometal ion associated with the macrocyclic chelator is ⁹⁰Y. In specific embodiments, the macrocyclic chelator is 1,4,7,10-tetraazacyclododecane-N,N′,N″,N′″-tetraacetic acid (DOTA). In other specific embodiments, DOTA is attached to an antibody of the invention or fragment thereof via a linker molecule. Examples of linker molecules useful for conjugating DOTA to a polypeptide are commonly known in the art—see, for example, DeNardo et al., Clin Cancer Res. 4(10):2483-90 (1998); Peterson et al., Bioconjug. Chem. 10(4):553-7 (1999); and Zimmerman et al, Nucl. Med. Biol. 26(8):943-50 (1999); which are hereby incorporated by reference in their entirety.

[0201] As mentioned, the proteins of the invention may be modified by either natural processes, such as posttranslational processing, or by chemical modification techniques which are well known in the art. It will be appreciated that the same type of modification may be present in the same or varying degrees at several sites in a given polypeptide. Polypeptides of the invention may be branched, for example, as a result of ubiquitination, and they may be cyclic, with or without branching. Cyclic, branched, and branched cyclic polypeptides may result from posttranslation natural processes or may be made by synthetic methods. Modifications include acetylation, acylation, ADP-ribosylation, amidation, covalent attachment of flavin, covalent attachment of a heme moiety, covalent attachment of a nucleotide or nucleotide derivative, covalent attachment of a lipid or lipid derivative, covalent attachment of phosphotidylinositol, cross-linking, cyclization, disulfide bond formation, demethylation, formation of covalent cross-links, formation of cysteine, formation of pyroglutamate, formylation, gamma-carboxylation, glycosylation, GPI anchor formation, hydroxylation, iodination, methylation, myristoylation, oxidation, pegylation, proteolytic processing, phosphorylation, prenylation, racemization, selenoylation, sulfation, transfer-RNA mediated addition of amino acids to proteins such as arginylation, and ubiquitination. (See, for instance, PROTEINS—STRUCTURE AND MOLECULAR PROPERTIES, 2nd Ed., T. E. Creighton, W. H. Freeman and Company, New York (1993); POSTTRANSLATIONAL COVALENT MODIFICATION OF PROTEINS, B. C. Johnson, Ed., Academic Press, New York, pgs. 1-12 (1983); Seifter et al., Meth. Enzymol. 182:626-646 (1990); Rattan et al., Ann. N.Y. Acad. Sci. 663:48-62 (1992)).

[0202] Also provided by the invention are chemically modified derivatives of the polypeptides of the invention which may provide additional advantages such as increased solubility, stability and circulating time of the polypeptide, or decreased immunogenicity (see U.S. Pat. No. 4,179,337). The chemical moieties for derivitization may be selected from water soluble polymers such as polyethylene glycol, ethylene glycol/propylene glycol copolymers, carboxymethylcellulose, dextran, polyvinyl alcohol and the like. The polypeptides may be modified at random positions within the molecule, or at predetermined positions within the molecule and may include one, two, three or more attached chemical moieties.

[0203] The polymer may be of any molecular weight, and may be branched or unbranched. For polyethylene glycol, the preferred molecular weight is between about 1 kDa and about 100 kDa (the term “about” indicating that in preparations of polyethylene glycol, some molecules will weigh more, some less, than the stated molecular weight) for ease in handling and manufacturing. Other sizes may be used, depending on the desired therapeutic profile (e.g., the duration of sustained release desired, the effects, if any on biological activity, the ease in handling, the degree or lack of antigenicity and other known effects of the polyethylene glycol to a therapeutic protein or analog). For example, the polyethylene glycol may have an average molecular weight of about 200, 500, 1000, 1500, 2000, 2500, 3000, 3500, 4000, 4500, 5000, 5500, 6000, 6500, 7000, 7500, 8000, 8500, 9000, 9500, 10,000, 10,500, 11,000, 11,500, 12,000, 12,500, 13,000, 13,500, 14,000, 14,500, 15,000, 15,500, 16,000, 16,500, 17,000, 17,500, 18,000, 18,500, 19,000, 19,500, 20,000, 25,000, 30,000, 35,000, 40,000, 45,000, 50,000, 55,000, 60,000, 65,000, 70,000, 75,000, 80,000, 85,000, 90,000, 95,000, or 100,000 kDa.

[0204] As noted above, the polyethylene glycol may have a branched structure. Branched polyethylene glycols are described, for example, in U.S. Pat. No. 5,643,575; Morpurgo et al., Appl. Biochem. Biotechnol. 56:59-72 (1996); Vorobjev et al., Nucleosides Nucleotides 18:2745-2750 (1999); and Caliceti et al., Bioconjug. Chem. 10:638-646 (1999), the disclosures of each of which are incorporated herein by reference.

[0205] The polyethylene glycol molecules (or other chemical moieties) should be attached to the protein with consideration of effects on functional or antigenic domains of the protein. There are a number of attachment methods available to those skilled in the art, such as, for example, the method disclosed in EP 0 401 384 (coupling PEG to G-CSF), herein incorporated by reference; see also Malik et al., Exp. Hematol. 20:1028-1035 (1992), reporting pegylation of GM-CSF using tresyl chloride. For example, polyethylene glycol may be covalently bound through amino acid residues via a reactive group, such as a free amino or carboxyl group. Reactive groups are those to which an activated polyethylene glycol molecule may be bound. The amino acid residues having a free amino group may include lysine residues and the N-terminal amino acid residues; those having a free carboxyl group may include aspartic acid residues glutamic acid residues and the C-terminal amino acid residue. Sulfhydryl groups may also be used as a reactive group for attaching the polyethylene glycol molecules. Preferred for therapeutic purposes is attachment at an amino group, such as attachment at the N-terminus or lysine group.

[0206] As suggested above, polyethylene glycol may be attached to proteins via linkage to any of a number of amino acid residues. For example, polyethylene glycol can be linked to proteins via covalent bonds to lysine, histidine, aspartic acid, glutamic acid, or cysteine residues. One or more reaction chemistries may be employed to attach polyethylene glycol to specific amino acid residues (e.g., lysine, histidine, aspartic acid, glutamic acid, or cysteine) of the protein or to more than one type of amino acid residue (e.g., lysine, histidine, aspartic acid, glutamic acid, cysteine and combinations thereof) of the protein.

[0207] One may specifically desire proteins chemically modified at the N-terminus. Using polyethylene glycol as an illustration of the present composition, one may select from a variety of polyethylene glycol molecules (by molecular weight, branching, etc.), the proportion of polyethylene glycol molecules to protein (polypeptide) molecules in the reaction mix, the type of pegylation reaction to be performed, and the method of obtaining the selected N-terminally pegylated protein. The method of obtaining the N-terminally pegylated preparation (i.e., separating this moiety from other monopegylated moieties if necessary) may be by purification of the N-terminally pegylated material from a population of pegylated protein molecules. Selective proteins chemically modified at the N-terminus modification may be accomplished by reductive alkylation which exploits differential reactivity of different types of primary amino groups (lysine versus the N-terminal) available for derivatization in a particular protein. Under the appropriate reaction conditions, substantially selective derivatization of the protein at the N-terminus with a carbonyl group containing polymer is achieved.

[0208] As indicated above, pegylation of the proteins of the invention may be accomplished by any number of means. For example, polyethylene glycol may be attached to the protein either directly or by an intervening linker. Linkerless systems for attaching polyethylene glycol to proteins are described in Delgado et al., Crit. Rev. Thera. Drug Carrier Sys. 9:249-304 (1992); Francis et al., Intern. J. of Hematol. 68:1-18 (1998); U.S. Pat. No. 4,002,531; U.S. Pat. No. 5,349,052; WO 95/06058; and WO 98/32466, the disclosures of each of which are incorporated herein by reference.

[0209] One system for attaching polyethylene glycol directly to amino acid residues of proteins without an intervening linker employs tresylated MPEG, which is produced by the modification of monmethoxy polyethylene glycol (MPEG) using tresylchloride (ClSO₂CH₂CF₃). Upon reaction of protein with tresylated MPEG, polyethylene glycol is directly attached to amine groups of the protein. Thus, the invention includes protein-polyethylene glycol conjugates produced by reacting proteins of the invention with a polyethylene glycol molecule having a 2,2,2-trifluoreothane sulphonyl group.

[0210] Polyethylene glycol can also be attached to proteins using a number of different intervening linkers. For example, U.S. Pat. No. 5,612,460, the entire disclosure of which is incorporated herein by reference, discloses urethane linkers for connecting polyethylene glycol to proteins. Protein-polyethylene glycol conjugates wherein the polyethylene glycol is attached to the protein by a linker can also be produced by reaction of proteins with compounds such as MPEG-succinimidylsuccinate, MPEG activated with 1,1′-carbonyldiimidazole, MPEG-2,4,5-trichloropenylcarbonate, MPEG-p-nitrophenolcarbonate, and various MPEG-succinate derivatives. A number of additional polyethylene glycol derivatives and reaction chemistries for attaching polyethylene glycol to proteins are described in International Publication No. WO 98/32466, the entire disclosure of which is incorporated herein by reference. Pegylated protein products produced using the reaction chemistries set out herein are included within the scope of the invention.

[0211] The number of polyethylene glycol moieties attached to each protein of the invention (i.e., the degree of substitution) may also vary. For example, the pegylated proteins of the invention may be linked, on average, to 1, 2, 3, 4, 5, 6, 7, 8, 9, 10, 12, 15, 17, 20, or more polyethylene glycol molecules. Similarly, the average degree of substitution within ranges such as 1-3, 2-4, 3-5, 4-6, 5-7, 6-8, 7-9, 8-10, 9-11, 10-12, 11-13, 12-14, 13-15, 14-16, 15-17, 16-18, 17-19, or 18-20 polyethylene glycol moieties per protein molecule. Methods for determining the degree of substitution are discussed, for example, in Delgado et al., Crit. Rev. Thera. Drug Carrier Sys. 9:249-304 (1992).

[0212] The polypeptides of the invention can be recovered and purified from chemical synthesis and recombinant cell cultures by standard methods which include, but are not limited to, ammonium sulfate or ethanol precipitation, acid extraction, anion or cation exchange chromatography, phosphocellulose chromatography, hydrophobic interaction chromatography, affinity chromatography, hydroxylapatite chromatography and lectin chromatography. Most preferably, high performance liquid chromatography (“HPLC”) is employed for purification. Well known techniques for refolding protein may be employed to regenerate active conformation when the polypeptide is denatured during isolation and/or purification.

[0213] The polypeptides of the invention may be in monomers or multimers (i.e., dimers, trimers, tetramers and higher multimers). Accordingly, the present invention relates to monomers and multimers of the polypeptides of the invention, their preparation, and compositions (preferably, Therapeutics) containing them. In specific embodiments, the polypeptides of the invention are monomers, dimers, trimers or tetramers. In additional embodiments, the multimers of the invention are at least dimers, at least trimers, or at least tetramers.

[0214] Multimers encompassed by the invention may be homomers or heteromers. As used herein, the term homomer refers to a multimer containing only polypeptides corresponding to a protein of the invention (e.g., the amino acid sequence of SEQ ID NO:Y, an amino acid sequence encoded by SEQ ID NO:X or the complement of SEQ ID NO:X, the amino acid sequence encoded by the portion of SEQ ID NO:X as defined in columns 8 and 9 of Table 2, and/or an amino acid sequence encoded by cDNA contained in Clone ID NO:Z (including fragments, variants, splice variants, and fusion proteins, corresponding to these as described herein)). These homomers may contain polypeptides having identical or different amino acid sequences. In a specific embodiment, a homomer of the invention is a multimer containing only polypeptides having an identical amino acid sequence. In another specific embodiment, a homomer of the invention is a multimer containing polypeptides having different amino acid sequences. In specific embodiments, the multimer of the invention is a homodimer (e.g., containing two polypeptides having identical or different amino acid sequences) or a homotrimer (e.g., containing three polypeptides having identical and/or different amino acid sequences). In additional embodiments, the homomeric multimer of the invention is at least a homodimer, at least a homotrimer, or at least a homotetramer.

[0215] As used herein, the term heteromer refers to a multimer containing one or more heterologous polypeptides (i.e., polypeptides of different proteins) in addition to the polypeptides of the invention. In a specific embodiment, the multimer of the invention is a heterodimer, a heterotrimer, or a heterotetramer. In additional embodiments, the heteromeric multimer of the invention is at least a heterodimer, at least a heterotrimer, or at least a heterotetramer.

[0216] Multimers of the invention may be the result of hydrophobic, hydrophilic, ionic and/or covalent associations and/or may be indirectly linked by, for example, liposome formation. Thus, in one embodiment, multimers of the invention, such as, for example, homodimers or homotrimers, are formed when polypeptides of the invention contact one another in solution. In another embodiment, heteromultimers of the invention, such as, for example, heterotrimers or heterotetramers, are formed when polypeptides of the invention contact antibodies to the polypeptides of the invention (including antibodies to the heterologous polypeptide sequence in a fusion protein of the invention) in solution. In other embodiments, multimers of the invention are formed by covalent associations with and/or between the polypeptides of the invention. Such covalent associations may involve one or more amino acid residues contained in the polypeptide sequence (e.g., that recited in SEQ ID NO:Y, encoded by the portion of SEQ ID NO:X as defined in columns 8 and 9 of Table 2, and/or encoded by the cDNA contained in Clone ID NO:Z). In one instance, the covalent associations are cross-linking between cysteine residues located within the polypeptide sequences which interact in the native (i.e., naturally occurring) polypeptide. In another instance, the covalent associations are the consequence of chemical or recombinant manipulation. Alternatively, such covalent associations may involve one or more amino acid residues contained in the heterologous polypeptide sequence in a fusion protein. In one example, covalent associations are between the heterologous sequence contained in a fusion protein of the invention (see, e.g., U.S. Pat. No. 5,478,925). In a specific example, the covalent associations are between the heterologous sequence contained in a Fc fusion protein of the invention (as described herein). In another specific example, covalent associations of fusion proteins of the invention are between heterologous polypeptide sequence from another protein that is capable of forming covalently associated multimers, such as for example, osteoprotegerin (see, e.g., International Publication NO: WO 98/49305, the contents of which are herein incorporated by reference in its entirety). In another embodiment, two or more polypeptides of the invention are joined through peptide linkers. Examples include those peptide linkers described in U.S. Pat. No. 5,073,627 (hereby incorporated by reference). Proteins comprising multiple polypeptides of the invention separated by peptide linkers may be produced using conventional recombinant DNA technology.

[0217] Another method for preparing multimer polypeptides of the invention involves use of polypeptides of the invention fused to a leucine zipper or isoleucine zipper polypeptide sequence. Leucine zipper and isoleucine zipper domains are polypeptides that promote multimerization of the proteins in which they are found. Leucine zippers were originally identified in several DNA-binding proteins (Landschulz et al., Science 240:1759, (1988)), and have since been found in a variety of different proteins. Among the known leucine zippers are naturally occurring peptides and derivatives thereof that dimerize or trimerize. Examples of leucine zipper domains suitable for producing soluble multimeric proteins of the invention are those described in PCT application WO 94/10308, hereby incorporated by reference. Recombinant fusion proteins comprising a polypeptide of the invention fused to a polypeptide sequence that dimerizes or trimerizes in solution are expressed in suitable host cells, and the resulting soluble multimeric fusion protein is recovered from the culture supernatant using techniques known in the art.

[0218] Trimeric polypeptides of the invention may offer the advantage of enhanced biological activity. Preferred leucine zipper moieties and isoleucine moieties are those that preferentially form trimers. One example is a leucine zipper derived from lung surfactant protein D (SPD), as described in Hoppe et al. (FEBS Letters 344:191, (1994)) and in U.S. patent application Ser. No. 08/446,922, hereby incorporated by reference. Other peptides derived from naturally occurring trimeric proteins may be employed in preparing trimeric polypeptides of the invention.

[0219] In another example, proteins of the invention are associated by interactions between Flag® polypeptide sequence contained in fusion proteins of the invention containing Flag® polypeptide sequence. In a further embodiment, proteins of the invention are associated by interactions between heterologous polypeptide sequence contained in Flag® fusion proteins of the invention and anti-Flag® antibody.

[0220] The multimers of the invention may be generated using chemical techniques known in the art. For example, polypeptides desired to be contained in the multimers of the invention may be chemically cross-linked using linker molecules and linker molecule length optimization techniques known in the art (see, e.g., U.S. Pat. No. 5,478,925, which is herein incorporated by reference in its entirety). Additionally, multimers of the invention may be generated using techniques known in the art to form one or more inter-molecule cross-links between the cysteine residues located within the sequence of the polypeptides desired to be contained in the multimer (see, e.g., U.S. Pat. No. 5,478,925, which is herein incorporated by reference in its entirety). Further, polypeptides of the invention may be routinely modified by the addition of cysteine or biotin to the C-terminus or N-terminus of the polypeptide and techniques known in the art may be applied to generate multimers containing one or more of these modified polypeptides (see, e.g., U.S. Pat. No. 5,478,925, which is herein incorporated by reference in its entirety). Additionally, techniques known in the art may be applied to generate liposomes containing the polypeptide components desired to be contained in the multimer of the invention (see, e.g., U.S. Pat. No. 5,478,925, which is herein incorporated by reference in its entirety).

[0221] Alternatively, multimers of the invention may be generated using genetic engineering techniques known in the art. In one embodiment, polypeptides contained in multimers of the invention are produced recombinantly using fusion protein technology described herein or otherwise known in the art (see, e.g., U.S. Pat. No. 5,478,925, which is herein incorporated by reference in its entirety). In a specific embodiment, polynucleotides coding for a homodimer of the invention are generated by ligating a polynucleotide sequence encoding a polypeptide of the invention to a sequence encoding a linker polypeptide and then further to a synthetic polynucleotide encoding the translated product of the polypeptide in the reverse orientation from the original C-terminus to the N-terminus (lacking the leader sequence) (see, e.g., U.S. Pat. No. 5,478,925, which is herein incorporated by reference in its entirety). In another embodiment, recombinant techniques described herein or otherwise known in the art are applied to generate recombinant polypeptides of the invention which contain a transmembrane domain (or hydrophobic or signal peptide) and which can be incorporated by membrane reconstitution techniques into liposomes (see, e.g., U.S. Pat. No. 5,478,925, which is herein incorporated by reference in its entirety).

[0222] Antibodies

[0223] Further polypeptides of the invention relate to antibodies and T-cell antigen receptors (TCR) which immunospecifically bind a polypeptide, polypeptide fragment, or variant of the invention (e.g., a polypeptide or fragment or variant of the amino acid sequence of SEQ ID NO:Y or a polypeptide encoded by the cDNA contained in Clone ID No:Z, and/or an epitope, of the present invention) as determined by immunoassays well known in the art for assaying specific antibody-antigen binding. Antibodies of the invention include, but are not limited to, polyclonal, monoclonal, multispecific, human, humanized or chimeric antibodies, single chain antibodies, Fab fragments, F(ab′) fragments, fragments produced by a Fab expression library, anti-idiotypic (anti-Id) antibodies (including, e.g., anti-Id antibodies to antibodies of the invention), intracellularly-made antibodies (i.e., intrabodies), and epitope-binding fragments of any of the above. The term “antibody,” as used herein, refers to immunoglobulin molecules and immunologically active portions of immunoglobulin molecules, i.e., molecules that contain an antigen binding site that immunospecifically binds an antigen. The immunoglobulin molecules of the invention can be of any type (e.g., IgG, IgE, IgM, IgD, IgA and IgY), class (e.g., IgG1, IgG2, IgG3, IgG4, IgA1 and IgA2) or subclass of immunoglobulin molecule. In preferred embodiments, the immunoglobulin molecules of the invention are IgG1. In other preferred embodiments, the immunoglobulin molecules of the invention are IgG4.

[0224] Most preferably the antibodies are human antigen-binding antibody fragments of the present invention and include, but are not limited to, Fab, Fab′ and F(ab′)2, Fd, single-chain Fvs (scFv), single-chain antibodies, disulfide-linked Fvs (sdFv) and fragments comprising either a VL or VH domain. Antigen-binding antibody fragments, including single-chain antibodies, may comprise the variable region(s) alone or in combination with the entirety or a portion of the following: hinge region, CH1, CH2, and CH3 domains. Also included in the invention are antigen-binding fragments also comprising any combination of variable region(s) with a hinge region, CH1, CH2, and CH3 domains. The antibodies of the invention may be from any animal origin including birds and mammals. Preferably, the antibodies are human, murine (e.g., mouse and rat), donkey, ship rabbit, goat, guinea pig, camel, horse, or chicken. As used herein, “human” antibodies include antibodies having the amino acid sequence of a human immunoglobulin and include antibodies isolated from human immunoglobulin libraries or from animals transgenic for one or more human immunoglobulin and that do not express endogenous immunoglobulins, as described infra and, for example in, U.S. Pat. No. 5,939,598 by Kucherlapati et al.

[0225] The antibodies of the present invention may be monospecific, bispecific, trispecific or of greater multispecificity. Multispecific antibodies may be specific for different epitopes of a polypeptide of the present invention or may be specific for both a polypeptide of the present invention as well as for a heterologous epitope, such as a heterologous polypeptide or solid support material. See, e.g., PCT publications WO 93/17715; WO 92/08802; WO 91/00360; WO 92/05793; Tutt, et al., J. Immunol. 147:60-69 (1991); U.S. Pat. Nos. 4,474,893; 4,714,681; 4,925,648; 5,573,920; 5,601,819; Kostelny et al., J. Immunol. 148:1547-1553 (1992).

[0226] Antibodies of the present invention may be described or specified in terms of the epitope(s) or portion(s) of a polypeptide of the present invention which they recognize or specifically bind. The epitope(s) or polypeptide portion(s) may be specified as described herein, e.g., by N-terminal and C-terminal positions, or by size in contiguous amino acid residues, or listed in the Tables and Figures. Preferred epitopes of the invention include the predicted epitopes shown in column 7 of Table 1A, as well as polynucleotides that encode these epitopes. Antibodies which specifically bind any epitope or polypeptide of the present invention may also be excluded. Therefore, the present invention includes antibodies that specifically bind polypeptides of the present invention, and allows for the exclusion of the same.

[0227] Antibodies of the present invention may also be described or specified in terms of their cross-reactivity. Antibodies that do not bind any other analog, ortholog, or homolog of a polypeptide of the present invention are included. Antibodies that bind polypeptides with at least 95%, at least 90%, at least 85%, at least 80%, at least 75%, at least 70%, at least 65%, at least 60%, at least 55%, and at least 50% identity (as calculated using methods known in the art and described herein) to a polypeptide of the present invention are also included in the present invention. In specific embodiments, antibodies of the present invention cross-react with murine, rat and/or rabbit homologs of human proteins and the corresponding epitopes thereof. Antibodies that do not bind polypeptides with less than 95%, less than 90%, less than 85%, less than 80%, less than 75%, less than 70%, less than 65%, less than 60%, less than 55%, and less than 50% identity (as calculated using methods known in the art and described herein) to a polypeptide of the present invention are also included in the present invention. In a specific embodiment, the above-described cross-reactivity is with respect to any single specific antigenic or immunogenic polypeptide, or combination(s) of 2, 3, 4, 5, or more of the specific antigenic and/or immunogenic polypeptides disclosed herein. Further included in the present invention are antibodies which bind polypeptides encoded by polynucleotides which hybridize to a polynucleotide of the present invention under stringent hybridization conditions (as described herein). Antibodies of the present invention may also be described or specified in terms of their binding affinity to a polypeptide of the invention. Preferred binding affinities include those with a dissociation constant or Kd less than 5×10⁻² M, 10⁻² M, 5×10⁻³ M, 10⁻³ M, 5×10⁻⁴ M, 10⁻⁴ M, 5×10⁻⁵ M, 10⁻⁵ M, 5×10⁻⁶ M, 10⁻⁶M, 5×10⁻⁷ M, 10⁷ M, 5×10⁻⁸ M, 10⁻⁸ M, 5×10⁻⁹ M, 10⁻⁹ M, 5×10⁻¹⁰ M, 10⁻¹⁰ M, 5×10⁻¹¹ M, 10⁻¹¹ M, 5×10⁻¹² M, 10⁻¹² M, 5×10⁻¹³ M, 10⁻¹³ M, 5×10⁻¹⁴ M, 10⁻¹⁴ M, 5×10⁻¹⁵ M, or 10⁻¹⁵ M.

[0228] The invention also provides antibodies that competitively inhibit binding of an antibody to an epitope of the invention as determined by any method known in the art for determining competitive binding, for example, the immunoassays described herein. In preferred embodiments, the antibody competitively inhibits binding to the epitope by at least 95%, at least 90%, at least 85%, at least 80%, at least 75%, at least 70%, at least 60%, or at least 50%.

[0229] Antibodies of the present invention may act as agonists or antagonists of the polypeptides of the present invention. For example, the present invention includes antibodies which disrupt the receptor/ligand interactions with the polypeptides of the invention either partially or fully. Preferably, antibodies of the present invention bind an antigenic epitope disclosed herein, or a portion thereof. The invention features both receptor-specific antibodies and ligand-specific antibodies. The invention also features receptor-specific antibodies which do not prevent ligand binding but prevent receptor activation. Receptor activation (i.e., signaling) may be determined by techniques described herein or otherwise known in the art. For example, receptor activation can be determined by detecting the phosphorylation (e.g., tyrosine or serine/threonine) of the receptor or its substrate by immunoprecipitation followed by western blot analysis (for example, as described supra). In specific embodiments, antibodies are provided that inhibit ligand activity or receptor activity by at least 95%, at least 90%, at least 85%, at least 80%, at least 75%, at least 70%, at least 60%, or at least 50% of the activity in absence of the antibody.

[0230] The invention also features receptor-specific antibodies which both prevent ligand binding and receptor activation as well as antibodies that recognize the receptor-ligand complex, and, preferably, do not specifically recognize the unbound receptor or the unbound ligand. Likewise, included in the invention are neutralizing antibodies which bind the ligand and prevent binding of the ligand to the receptor, as well as antibodies which bind the ligand, thereby preventing receptor activation, but do not prevent the ligand from binding the receptor. Further included in the invention are antibodies which activate the receptor. These antibodies may act as receptor agonists, i.e., potentiate or activate either all or a subset of the biological activities of the ligand-mediated receptor activation, for example, by inducing dimerization of the receptor. The antibodies may be specified as agonists, antagonists or inverse agonists for biological activities comprising the specific biological activities of the peptides of the invention disclosed herein. The above antibody agonists can be made using methods known in the art. See, e.g., PCT publication WO 96/40281; U.S. Pat. No. 5,811,097; Deng et al., Blood 92(6):1981-1988 (1998); Chen et al., Cancer Res. 58(16):3668-3678 (1998); Harrop et al., J. Immunol. 161(4):1786-1794 (1998); Zhu et al., Cancer Res. 58(15):3209-3214 (1998); Yoon et al., J. Immunol. 160(7):3170-3179 (1998); Prat et al., J. Cell. Sci. 111(Pt2):237-247 (1998); Pitard et al., J. Immunol. Methods 205(2):177-190 (1997); Liautard et al., Cytokine 9(4):233-241 (1997); Carlson et al., J. Biol. Chem. 272(17):11295-11301 (1997); Taryman et al., Neuron 14(4):755-762 (1995); Muller et al., Structure 6(9):1153-1167 (1998); Bartunek et al., Cytokine 8(1):14-20 (1996) (which are all incorporated by reference herein in their entireties).

[0231] Antibodies of the present invention may be used, for example, to purify, detect, and target the polypeptides of the present invention, including both in vitro and in vivo diagnostic and therapeutic methods. For example, the antibodies have utility in immunoassays for qualitatively and quantitatively measuring levels of the polypeptides of the present invention in biological samples. See, e.g., Harlow et al., Antibodies: A Laboratory Manual, (Cold Spring Harbor Laboratory Press, 2nd ed. 1988); incorporated by reference herein in its entirety.

[0232] As discussed in more detail below, the antibodies of the present invention may be used either alone or in combination with other compositions. The antibodies may further be recombinantly fused to a heterologous polypeptide at the N- or C-terminus or chemically conjugated (including covalent and non-covalent conjugations) to polypeptides or other compositions. For example, antibodies of the present invention may be recombinantly fused or conjugated to molecules useful as labels in detection assays and effector molecules such as heterologous polypeptides, drugs, radionuclides, or toxins. See, e.g., PCT publications WO 92/08495; WO 91/14438; WO 89/12624; U.S. Pat. No. 5,314,995; and EP 396,387; the disclosures of which are incorporated herein by reference in their entireties.

[0233] The antibodies of the invention include derivatives that are modified, i.e, by the covalent attachment of any type of molecule to the antibody such that covalent attachment does not prevent the antibody from generating an anti-idiotypic response. For example, but not by way of limitation, the antibody derivatives include antibodies that have been modified, e.g., by glycosylation, acetylation, pegylation, phosphylation, amidation, derivatization by known protecting/blocking groups, proteolytic cleavage, linkage to a cellular ligand or other protein, etc. Any of numerous chemical modifications may be carried out by known techniques, including, but not limited to specific chemical cleavage, acetylation, formylation, metabolic synthesis of tunicamycin, etc. Additionally, the derivative may contain one or more non-classical amino acids.

[0234] The antibodies of the present invention may be generated by any suitable method known in the art. Polyclonal antibodies to an antigen-of- interest can be produced by various procedures well known in the art. For example, a polypeptide of the invention can be administered to various host animals including, but not limited to, rabbits, mice, rats, etc. to induce the production of sera containing polyclonal antibodies specific for the antigen. Various adjuvants may be used to increase the immunological response, depending on the host species, and include but are not limited to, Freund's (complete and incomplete), mineral gels such as aluminum hydroxide, surface active substances such as lysolecithin, pluronic polyols, polyanions, peptides, oil emulsions, keyhole limpet hemocyanins, dinitrophenol, and potentially useful human adjuvants such as BCG (bacille Calmette-Guerin) and corynebacterium parvum. Such adjuvants are also well known in the art.

[0235] Monoclonal antibodies can be prepared using a wide variety of techniques known in the art including the use of hybridoma, recombinant, and phage display technologies, or a combination thereof. For example, monoclonal antibodies can be produced using hybridoma techniques including those known in the art and taught, for example, in Harlow et al., Antibodies: A Laboratory Manual, (Cold Spring Harbor Laboratory Press, 2nd ed. 1988); Hammerling, et al., in: Monoclonal Antibodies and T-Cell Hybridomas 563-681 (Elsevier, N.Y., 1981) (said references incorporated by reference in their entireties). The term “monoclonal antibody” as used herein is not limited to antibodies produced through hybridoma technology. The term “monoclonal antibody” refers to an antibody that is derived from a single clone, including any eukaryotic, prokaryotic, or phage clone, and not the method by which it is produced.

[0236] Methods for producing and screening for specific antibodies using hybridoma technology are routine and well known in the art and are discussed in detail in the Examples. In a non-limiting example, mice can be immunized with a polypeptide of the invention or a cell expressing such peptide. Once an immune response is detected, e.g., antibodies specific for the antigen are detected in the mouse serum, the mouse spleen is harvested and splenocytes isolated. The splenocytes are then fused by well known techniques to any suitable myeloma cells, for example cells from cell line SP20 available from the ATCC. Hybridomas are selected and cloned by limited dilution. The hybridoma clones are then assayed by methods known in the art for cells that secrete antibodies capable of binding a polypeptide of the invention. Ascites fluid, which generally contains high levels of antibodies, can be generated by immunizing mice with positive hybridoma clones.

[0237] Accordingly, the present invention provides methods of generating monoclonal antibodies as well as antibodies produced by the method comprising culturing a hybridoma cell secreting an antibody of the invention wherein, preferably, the hybridoma is generated by fusing splenocytes isolated from a mouse immunized with an antigen of the invention with myeloma cells and then screening the hybridomas resulting from the fusion for hybridoma clones that secrete an antibody able to bind a polypeptide of the invention.

[0238] Another well known method for producing both polyclonal and monoclonal human B cell lines is transformation using Epstein Barr Virus (EBV). Protocols for generating EBV-transformed B cell lines are commonly known in the art, such as, for example, the protocol outlined in Chapter 7.22 of Current Protocols in Immunology, Coligan et al., Eds., 1994, John Wiley & Sons, NY, which is hereby incorporated in its entirety by reference. The source of B cells for transformation is commonly human peripheral blood, but B cells for transformation may also be derived from other sources including, but not limited to, lymph nodes, tonsil, spleen, tumor tissue, and infected tissues. Tissues are generally made into single cell suspensions prior to EBV transformation. Additionally, steps may be taken to either physically remove or inactivate T cells (e.g., by treatment with cyclosporin A) in B cell-containing samples, because T cells from individuals seropositive for anti-EBV antibodies can suppress B cell immortalization by EBV.

[0239] In general, the sample containing human B cells is innoculated with EBV, and cultured for 3-4 weeks. A typical source of EBV is the culture supernatant of the B95-8 cell line (ATCC #VR-1492). Physical signs of EBV transformation can generally be seen towards the end of the 3-4 week culture period. By phase-contrast microscopy, transformed cells may appear large, clear, hairy and tend to aggregate in tight clusters of cells. Initially, EBV lines are generally polyclonal. However, over prolonged periods of cell cultures, EBV lines may become monoclonal or polyclonal as a result of the selective outgrowth of particular B cell clones. Alternatively, polyclonal EBV transformed lines may be subcloned (e.g., by limiting dilution culture) or fused with a suitable fusion partner and plated at limiting dilution to obtain monoclonal B cell lines. Suitable fusion partners for EBV transformed cell lines include mouse myeloma cell lines (e.g., SP2/0,×63-Ag8.653), heteromyeloma cell lines (human×mouse; e.g, SPAM-8, SBC—H20, and CB-F7), and human cell lines (e.g., GM 1500, SKO-007, RPMI 8226, and KR-4). Thus, the present invention also provides a method of generating polyclonal or monoclonal human antibodies against polypeptides of the invention or fragments thereof, comprising EBV-transformation of human B cells.

[0240] Antibody fragments which recognize specific epitopes may be generated by known techniques. For example, Fab and F(ab′)2 fragments of the invention may be produced by proteolytic cleavage of immunoglobulin molecules, using enzymes such as papain (to produce Fab fragments) or pepsin (to produce F(ab′)2 fragments). F(ab′)2 fragments contain the variable region, the light chain constant region and the CH1 domain of the heavy chain.

[0241] For example, the antibodies of the present invention can also be generated using various phage display methods known in the art. In phage display methods, functional antibody domains are displayed on the surface of phage particles which carry the polynucleotide sequences encoding them. In a particular embodiment, such phage can be utilized to display antigen binding domains expressed from a repertoire or combinatorial antibody library (e.g., human or murine). Phage expressing an antigen binding domain that binds the antigen of interest can be selected or identified with antigen, e.g., using labeled antigen or antigen bound or captured to a solid surface or bead. Phage used in these methods are typically filamentous phage including fd and M13 binding domains expressed from phage with Fab, Fv or disulfide stabilized Fv antibody domains recombinantly fused to either the phage gene III or gene VIII protein. Examples of phage display methods that can be used to make the antibodies of the present invention include those disclosed in Brinkman et al., J. Immunol. Methods 182:41-50 (1995); Ames et al., J. Immunol. Methods 184:177-186 (1995); Kettleborough et al., Eur. J. Immunol. 24:952-958 (1994); Persic et al., Gene 187 9-18 (1997); Burton et al., Advances in Immunology 57:191-280 (1994); PCT application No. PCT/GB91/01134; PCT publications WO 90/02809; WO 91/10737; WO 92/01047; WO 92/18619; WO 93/11236; WO 95/15982; WO 95/20401; and U.S. Pat. Nos. 5,698,426; 5,223,409; 5,403,484; 5,580,717; 5,427,908; 5,750,753; 5,821,047; 5,571,698; 5,427,908; 5,516,637; 5,780,225; 5,658,727; 5,733,743 and 5,969,108; each of which is incorporated herein by reference in its entirety.

[0242] As described in the above references, after phage selection, the antibody coding regions from the phage can be isolated and used to generate whole antibodies, including human antibodies, or any other desired antigen binding fragment, and expressed in any desired host, including mammalian cells, insect cells, plant cells, yeast, and bacteria, e.g., as described in detail below. For example, techniques to recombinantly produce Fab, Fab′ and F(ab′)2 fragments can also be employed using methods known in the art such as those disclosed in PCT publication WO 92/22324; Mullinax et al., BioTechniques 12(6):864-869 (1992); and Sawai et al., AJRI 34:26-34 (1995); and Better et al., Science 240:1041-1043 (1988) (said references incorporated by reference in their entireties).

[0243] Examples of techniques which can be used to produce single-chain Fvs and antibodies include those described in U.S. Pat. Nos. 4,946,778 and 5,258,498;Huston et al., Methods in Enzymology 203:46-88 (1991); Shu et al., PNAS 90:7995-7999 (1993); and Skerra et al., Science 240:1038-1040 (1988). For some uses, including in vivo use of antibodies in humans and in vitro detection assays, it may be preferable to use chimeric, humanized, or human antibodies. A chimeric antibody is a molecule in which different portions of the antibody are derived from different animal species, such as antibodies having a variable region derived from a murine monoclonal antibody and a human immunoglobulin constant region. Methods for producing chimeric antibodies are known in the art. See e.g., Morrison, Science 229:1202 (1985); Oi et al., BioTechniques 4:214 (1986); Gillies et al., (1989) J. Immunol. Methods 125:191-202; U.S. Pat. Nos. 5,807,715; 4,816,567; and 4,816397, which are incorporated herein by reference in their entirety. Humanized antibodies are antibody molecules from non-human species antibody that binds the desired antigen having one or more complementarity determining regions (CDRs) from the non-human species and a framework regions from a human immunoglobulin molecule. Often, framework residues in the human framework regions will be substituted with the corresponding residue from the CDR donor antibody to alter, preferably improve, antigen binding. These framework substitutions are identified by methods well known in the art, e.g., by modeling of the interactions of the CDR and framework residues to identify framework residues important for antigen binding and sequence comparison to identify unusual framework residues at particular positions. (See, e.g., Queen et al., U.S. Pat. No. 5,585,089; Riechmann et al., Nature 332:323 (1988), which are incorporated herein by reference in their entireties.) Antibodies can be humanized using a variety of techniques known in the art including, for example, CDR-grafting (EP 239,400; PCT publication WO 91/09967; U.S. Pat. Nos. 5,225,539; 5,530,101; and 5,585,089), veneering or resurfacing (EP 592,106; EP 519,596; Padlan, Molecular Immunology 28(4/5):489-498 (1991); Studnicka et al., Protein Engineering 7(6):805-814 (1994); Roguska. et al., PNAS 91:969-973 (1994)), and chain shuffling (U.S. Pat. No. 5,565,332).

[0244] Completely human antibodies are particularly desirable for therapeutic treatment of human patients. Human antibodies can be made by a variety of methods known in the art including phage display methods described above using antibody libraries derived from human immunoglobulin sequences. See also, U.S. Pat. Nos. 4,444,887 and 4,716,111; and PCT publications WO 98/46645, WO 98/50433, WO 98/24893, WO 98/16654, WO 96/34096, WO 96/33735, and WO 91/10741; each of which is incorporated herein by reference in its entirety.

[0245] Human antibodies can also be produced using transgenic mice which are incapable of expressing functional endogenous immunoglobulins, but which can express human immunoglobulin genes. For example, the human heavy and light chain immunoglobulin gene complexes may be introduced randomly or by homologous recombination into mouse embryonic stem cells. Alternatively, the human variable region, constant region, and diversity region may be introduced into mouse embryonic stem cells in addition to the human heavy and light chain genes. The mouse heavy and light chain immunoglobulin genes may be rendered non-functional separately or simultaneously with the introduction of human immunoglobulin loci by homologous recombination. In particular, homozygous deletion of the JH region prevents endogenous antibody production. The modified embryonic stem cells are expanded and microinjected into blastocysts to produce chimeric mice. The chimeric mice are then bred to produce homozygous offspring which express human antibodies. The transgenic mice are immunized in the normal fashion with a selected antigen, e.g., all or a portion of a polypeptide of the invention. Monoclonal antibodies directed against the antigen can be obtained from the immunized, transgenic mice using conventional hybridoma technology. The human immunoglobulin transgenes harbored by the transgenic mice rearrange during B cell differentiation, and subsequently undergo class switching and somatic mutation. Thus, using such a technique, it is possible to produce therapeutically useful IgG, IgA, IgM and IgE antibodies. For an overview of this technology for producing human antibodies, see Lonberg and Huszar, Int. Rev. Immunol. 13:65-93 (1995). For a detailed discussion of this technology for producing human antibodies and human monoclonal antibodies and protocols for producing such antibodies, see, e.g., PCT publications WO 98/24893; WO 92/01047; WO 96/34096; WO 96/33735; European Patent No. 0 598 877; U.S. Pat. Nos. 5,413,923; 5,625,126; 5,633,425; 5,569,825; 5,661,016; 5,545,806; 5,814,318; 5,885,793; 5,916,771; 5,939,598; 6,075,181; and 6,114,598, which are incorporated by reference herein in their entirety. In addition, companies such as Abgenix, Inc. (Freemont, Calif.) and Genpharm (San Jose, Calif.) can be engaged to provide human antibodies directed against a selected antigen using technology similar to that described above.

[0246] Completely human antibodies which recognize a selected epitope can be generated using a technique referred to as “guided selection.” In this approach a selected non-human monoclonal antibody, e.g., a mouse antibody, is used to guide the selection of a completely human antibody recognizing the same epitope. (Jespers et al., Bio/technology 12:899-903 (1988)).

[0247] Further, antibodies to the polypeptides of the invention can, in turn, be utilized to generate anti-idiotype antibodies that “mimic” polypeptides of the invention using techniques well known to those skilled in the art. (See, e.g., Greenspan & Bona, FASEB J. 7(5):437-444; (1989) and Nissinoff, J. Immunol. 147(8):2429-2438 (1991)). For example, antibodies which bind to and competitively inhibit polypeptide multimerization and/or binding of a polypeptide of the invention to a ligand can be used to generate anti-idiotypes that “mimic” the polypeptide multimerization and/or binding domain and, as a consequence, bind to and neutralize polypeptide and/or its ligand. Such neutralizing anti-idiotypes or Fab fragments of such anti-idiotypes can be used in therapeutic regimens to neutralize polypeptide ligand(s)/receptor(s). For example, such anti-idiotypic antibodies can be used to bind a polypeptide of the invention and/or to bind its ligand(s)/receptor(s), and thereby block its biological activity. Alternatively, antibodies which bind to and enhance polypeptide multimerization and/or binding, and/or receptor/ligand multimerization, binding and/or signaling can be used to generate anti-idiotypes that function as agonists of a polypeptide of the invention and/or its ligand/receptor. Such agonistic anti-idiotypes or Fab fragments of such anti-idiotypes can be used in therapeutic regimens as agonists of the polypeptides of the invention or its ligand(s)/receptor(s). For example, such anti-idiotypic antibodies can be used to bind a polypeptide of the invention and/or to bind its ligand(s)/receptor(s), and thereby promote or enhance its biological activity.

[0248] Intrabodies of the invention can be produced using methods known in the art, such as those disclosed and reviewed in Chen et al., Hum. Gene Ther. 5:595-601 (1994); Marasco, W. A., Gene Ther. 4:11-15 (1997); Rondon and Marasco, Annu. Rev. Microbiol. 51:257-283 (1997); Proba et al., J. Mol. Biol. 275:245-253 (1998); Cohen et al., Oncogene 17:2445-2456 (1998); Ohage and Steipe, J. Mol. Biol. 291:1119-1128 (1999); Ohage et al., J. Mol. Biol. 291:1129-1134 (1999); Wirtz and Steipe, Protein Sci. 8:2245-2250 (1999); Zhu et al., J. Immunol. Methods 231:207-222 (1999); and references cited therein.

[0249] Polynucleotides Encoding Antibodies

[0250] The invention further provides polynucleotides comprising a nucleotide sequence encoding an antibody of the invention and fragments thereof. The invention also encompasses polynucleotides that hybridize under stringent or alternatively, under lower stringency hybridization conditions, e.g., as defined supra, to polynucleotides that encode an antibody, preferably, that specifically binds to a polypeptide of the invention, preferably, an antibody that binds to a polypeptide having the amino acid sequence of SEQ ID NO:Y, to a polypeptide encoded by a portion of SEQ ID NO:X as defined in columns 8 and 9 of Table 2, and/or to a polypeptide encoded by the cDNA contained in Clone ID NO:Z.

[0251] The polynucleotides may be obtained, and the nucleotide sequence of the polynucleotides determined, by any method known in the art. For example, if the nucleotide sequence of the antibody is known, a polynucleotide encoding the antibody may be assembled from chemically synthesized oligonucleotides (e.g., as described in Kutmeier et al., BioTechniques 17:242 (1994)), which, briefly, involves the synthesis of overlapping oligonucleotides containing portions of the sequence encoding the antibody, annealing and ligating of those oligonucleotides, and then amplification of the ligated oligonucleotides by PCR.

[0252] Alternatively, a polynucleotide encoding an antibody may be generated from nucleic acid from a suitable source. If a clone containing a nucleic acid encoding a particular antibody is not available, but the sequence of the antibody molecule is known, a nucleic acid encoding the immunoglobulin may be chemically synthesized or obtained from a suitable source (e.g., an antibody cDNA library, or a cDNA library generated from, or nucleic acid, preferably poly A+ RNA, isolated from, any tissue or cells expressing the antibody, such as hybridoma cells selected to express an antibody of the invention) by PCR amplification using synthetic primers hybridizable to the 3′ and 5′ ends of the sequence or by cloning using an oligonucleotide probe specific for the particular gene sequence to identify, e.g., a cDNA clone from a cDNA library that encodes the antibody. Amplified nucleic acids generated by PCR may then be cloned into replicable cloning vectors using any method well known in the art.

[0253] Once the nucleotide sequence and corresponding amino acid sequence of the antibody is determined, the nucleotide sequence of the antibody may be manipulated using methods well known in the art for the manipulation of nucleotide sequences, e.g., recombinant DNA techniques, site directed mutagenesis, PCR, etc. (see, for example, the techniques described in Sambrook et al., 1990, Molecular Cloning, A Laboratory Manual, 2d Ed., Cold Spring Harbor Laboratory, Cold Spring Harbor, N.Y. and Ausubel et al., eds., 1998, Current Protocols in Molecular Biology, John Wiley & Sons, NY, which are both incorporated by reference herein in their entireties), to generate antibodies having a different amino acid sequence, for example to create amino acid substitutions, deletions, and/or insertions.

[0254] In a specific embodiment, the amino acid sequence of the heavy and/or light chain variable domains may be inspected to identify the sequences of the complementarity determining regions (CDRs) by methods that are well know in the art, e.g., by comparison to known amino acid sequences of other heavy and light chain variable regions to determine the regions of sequence hypervariability. Using routine recombinant DNA techniques, one or more of the CDRs may be inserted within framework regions, e.g., into human framework regions to humanize a non-human antibody, as described supra. The framework regions may be naturally occurring or consensus framework regions, and preferably human framework regions (see, e.g., Chothia et al., J. Mol. Biol. 278: 457-479 (1998) for a listing of human framework regions). Preferably, the polynucleotide generated by the combination of the framework regions and CDRs encodes an antibody that specifically binds a polypeptide of the invention. Preferably, as discussed supra, one or more amino acid substitutions may be made within the framework regions, and, preferably, the amino acid substitutions improve binding of the antibody to its antigen. Additionally, such methods may be used to make amino acid substitutions or deletions of one or more variable region cysteine residues participating in an intrachain disulfide bond to generate antibody molecules lacking one or more intrachain disulfide bonds. Other alterations to the polynucleotide are encompassed by the present invention and within the skill of the art.

[0255] In addition, techniques developed for the production of “chimeric antibodies” (Morrison et al., Proc. Natl. Acad. Sci. 81:851-855 (1984); Neuberger et al., Nature 312:604-608 (1984); Takeda et al., Nature 314:452-454 (1985)) by splicing genes from a mouse antibody molecule of appropriate antigen specificity together with genes from a human antibody molecule of appropriate biological activity can be used. As described supra, a chimeric antibody is a molecule in which different portions are derived from different animal species, such as those having a variable region derived from a murine mAb and a human immunoglobulin constant region, e.g., humanized antibodies.

[0256] Alternatively, techniques described for the production of single chain antibodies (U.S. Pat. No. 4,946,778; Bird, Science 242:423-42 (1988); Huston et al., Proc. Natl. Acad. Sci. USA 85:5879-5883 (1988); and Ward et al., Nature 334:544-54 (1989)) can be adapted to produce single chain antibodies. Single chain antibodies are formed by linking the heavy and light chain fragments of the Fv region via an amino acid bridge, resulting in a single chain polypeptide. Techniques for the assembly of functional Fv fragments in E. coli may also be used (Skerra et al., Science 242:1038-1041 (1988)).

[0257] Methods of Producing Antibodies

[0258] The antibodies of the invention can be produced by any method known in the art for the synthesis of antibodies, in particular, by chemical synthesis or preferably, by recombinant expression techniques. Methods of producing antibodies include, but are not limited to, hybridoma technology, EBV transformation, and other methods discussed herein as well as through the use recombinant DNA technology, as discussed below.

[0259] Recombinant expression of an antibody of the invention, or fragment, derivative or analog thereof, (e.g., a heavy or light chain of an antibody of the invention or a single chain antibody of the invention), requires construction of an expression vector containing a polynucleotide that encodes the antibody. Once a polynucleotide encoding an antibody molecule or a heavy or light chain of an antibody, or portion thereof (preferably containing the heavy or light chain variable domain), of the invention has been obtained, the vector for the production of the antibody molecule may be produced by recombinant DNA technology using techniques well known in the art. Thus, methods for preparing a protein by expressing a polynucleotide containing an antibody encoding nucleotide sequence are described herein. Methods which are well known to those skilled in the art can be used to construct expression vectors containing antibody coding sequences and appropriate transcriptional and translational control signals. These methods include, for example, in vitro recombinant DNA techniques, synthetic techniques, and in vivo genetic recombination. The invention, thus, provides replicable vectors comprising a nucleotide sequence encoding an antibody molecule of the invention, or a heavy or light chain thereof, or a heavy or light chain variable domain, operably linked to a promoter. Such vectors may include the nucleotide sequence encoding the constant region of the antibody molecule (see, e.g., PCT Publication WO 86/05807; PCT Publication WO 89/01036; and U.S. Pat. No. 5,122,464) and the variable domain of the antibody may be cloned into such a vector for expression of the entire heavy or light chain.

[0260] The expression vector is transferred to a host cell by conventional techniques and the transfected cells are then cultured by conventional techniques to produce an antibody of the invention. Thus, the invention includes host cells containing a polynucleotide encoding an antibody of the invention, or a heavy or light chain thereof, or a single chain antibody of the invention, operably linked to a heterologous promoter. In preferred embodiments for the expression of double-chained antibodies, vectors encoding both the heavy and light chains may be co-expressed in the host cell for expression of the entire immunoglobulin molecule, as detailed below.

[0261] A variety of host-expression vector systems may be utilized to express the antibody molecules of the invention. Such host-expression systems represent vehicles by which the coding sequences of interest may be produced and subsequently purified, but also represent cells which may, when transformed or transfected with the appropriate nucleotide coding sequences, express an antibody molecule of the invention in situ. These include but are not limited to microorganisms such as bacteria (e.g., E. coli, B. subtilis) transformed with recombinant bacteriophage DNA, plasmid DNA or cosmid DNA expression vectors containing antibody coding sequences; yeast (e.g., Saccharomyces, Pichia) transformed with recombinant yeast expression vectors containing antibody coding sequences; insect cell systems infected with recombinant virus expression vectors (e.g., baculovirus) containing antibody coding sequences; plant cell systems infected with recombinant virus expression vectors (e.g., cauliflower mosaic virus, CaMV; tobacco mosaic virus, TMV) or transformed with recombinant plasmid expression vectors (e.g., Ti plasmid) containing antibody coding sequences; or mammalian cell systems (e.g., COS, CHO, BHK, 293, 3T3 cells) harboring recombinant expression constructs containing promoters derived from the genome of mammalian cells (e.g., metallothionein promoter) or from mammalian viruses (e.g., the adenovirus late promoter; the vaccinia virus 7.5K promoter). Preferably, bacterial cells such as Escherichia coli, and more preferably, eukaryotic cells, especially for the expression of whole recombinant antibody molecule, are used for the expression of a recombinant antibody molecule. For example, mammalian cells such as Chinese hamster ovary cells (CHO), in conjunction with a vector such as the major intermediate early gene promoter element from human cytomegalovirus is an effective expression system for antibodies (Foecking et al., Gene 45:101 (1986); Cockett et al., Bio/Technology 8:2 (1990)).

[0262] In bacterial systems, a number of expression vectors may be advantageously selected depending upon the use intended for the antibody molecule being expressed. For example, when a large quantity of such a protein is to be produced, for the generation of pharmaceutical compositions of an antibody molecule, vectors which direct the expression of high levels of fusion protein products that are readily purified may be desirable. Such vectors include, but are not limited, to the E. coli expression vector pUR278 (Ruther et al., EMBO J. 2:1791 (1983)), in which the antibody coding sequence may be ligated individually into the vector in frame with the lac Z coding region so that a fusion protein is produced; pIN vectors (Inouye & Inouye, Nucleic Acids Res. 13:3101-3109 (1985); Van Heeke & Schuster, J. Biol. Chem. 24:5503-5509 (1989)); and the like. pGEX vectors may also be used to express foreign polypeptides as fusion proteins with glutathione S-transferase (GST). In general, such fusion proteins are soluble and can easily be purified from lysed cells by adsorption and binding to matrix glutathione-agarose beads followed by elution in the presence of free glutathione. The pGEX vectors are designed to include thrombin or factor Xa protease cleavage sites so that the cloned target gene product can be released from the GST moiety.

[0263] In an insect system, Autographa californica nuclear polyhedrosis virus (AcNPV) is used as a vector to express foreign genes. The virus grows in Spodoptera frugiperda cells. The antibody coding sequence may be cloned individually into non-essential regions (for example the polyhedrin gene) of the virus and placed under control of an AcNPV promoter (for example the polyhedrin promoter).

[0264] In mammalian host cells, a number of viral-based expression systems may be utilized. In cases where an adenovirus is used as an expression vector, the antibody coding sequence of interest may be ligated to an adenovirus transcription/translation control complex, e.g., the late promoter and tripartite leader sequence. This chimeric gene may then be inserted in the adenovirus genome by in vitro or in vivo recombination. Insertion in a non- essential region of the viral genome (e.g., region E1 or E3) will result in a recombinant virus that is viable and capable of expressing the antibody molecule in infected hosts. (e.g., see Logan & Shenk, Proc. Natl. Acad. Sci. USA 81:355-359 (1984)). Specific initiation signals may also be required for efficient translation of inserted antibody coding sequences. These signals include the ATG initiation codon and adjacent sequences. Furthermore, the initiation codon must be in phase with the reading frame of the desired coding sequence to ensure translation of the entire insert. These exogenous translational control signals and initiation codons can be of a variety of origins, both natural and synthetic. The efficiency of expression may be enhanced by the inclusion of appropriate transcription enhancer elements, transcription terminators, etc. (see Bittner et al., Methods in Enzymol. 153:51-544 (1987)).

[0265] In addition, a host cell strain may be chosen which modulates the expression of the inserted sequences, or modifies and processes the gene product in the specific fashion desired. Such modifications (e.g., glycosylation) and processing (e.g., cleavage) of protein products may be important for the function of the protein. Different host cells have characteristic and specific mechanisms for the post-translational processing and modification of proteins and gene products. Appropriate cell lines or host systems can be chosen to ensure the correct modification and processing of the foreign protein expressed. To this end, eukaryotic host cells which possess the cellular machinery for proper processing of the primary transcript, glycosylation, and phosphorylation of the gene product may be used. Such mammalian host cells include but are not limited to CHO, VERY, BHK, Hela, COS, MDCK, 293, 3T3, W138, and in particular, breast cancer cell lines such as, for example, BT483,Hs578T, HTB2, BT20 and T47D, and normal mammary gland cell line such as, for example, CRL7030 and Hs578Bst.

[0266] For long-term, high-yield production of recombinant proteins, stable expression is preferred. For example, cell lines which stably express the antibody molecule may be engineered. Rather than using expression vectors which contain viral origins of replication, host cells can be transformed with DNA controlled by appropriate expression control elements (e.g., promoter, enhancer, sequences, transcription terminators, polyadenylation sites, etc.), and a selectable marker. Following the introduction of the foreign DNA, engineered cells may be allowed to grow for 1-2 days in an enriched media, and then are switched to a selective media. The selectable marker in the recombinant plasmid confers resistance to the selection and allows cells to stably integrate the plasmid into their chromosomes and grow to form foci which in turn can be cloned and expanded into cell lines. This method may advantageously be used to engineer cell lines which express the antibody molecule. Such engineered cell lines may be particularly useful in screening and evaluation of compounds that interact directly or indirectly with the antibody molecule.

[0267] A number of selection systems may be used, including but not limited to the herpes simplex virus thymidine kinase (Wigler et al., Cell 11:223 (1977)), hypoxanthine-guanine phosphoribosyltransferase (Szybalska & Szybalski, Proc. Natl. Acad. Sci. USA 48:202 (1992)), and adenine phosphoribosyltransferase (Lowy et al., Cell 22:817 (1980)) genes can be employed in tk-, hgprt- or aprt-cells, respectively. Also, antimetabolite resistance can be used as the basis of selection for the following genes: dhfr, which confers resistance to methotrexate (Wigler et al., Natl. Acad. Sci. USA 77:357 (1980); O'Hare et al., Proc. Natl. Acad. Sci. USA 78:1527 (1981)); gpt, which confers resistance to mycophenolic acid (Mulligan & Berg, Proc. Natl. Acad. Sci. USA 78:2072 (1981)); neo, which confers resistance to the aminoglycoside G-418 Clinical Pharmacy 12:488-505; Wu and Wu, Biotherapy 3:87-95 (1991); Tolstoshev, Ann. Rev. Pharmacol. Toxicol. 32:573-596 (1993); Mulligan, Science 260:926-932 (1993); and Morgan and Anderson, Ann. Rev. Biochem. 62:191-217 (1993); May, 1993, TIB TECH 11(5):155-215 (1993)); and hygro, which confers resistance to hygromycin (Santerre et al., Gene 30:147 (1984)). Methods commonly known in the art of recombinant DNA technology may be routinely applied to select the desired recombinant clone, and such methods are described, for example, in Ausubel et al. (eds.), Current Protocols in Molecular Biology, John Wiley & Sons, NY (1993); Kriegler, Gene Transfer and Expression, A Laboratory Manual, Stockton Press, NY (1990); and in Chapters 12 and 13, Dracopoli et al. (eds), Current Protocols in Human Genetics, John Wiley & Sons, NY (1994); Colberre-Garapin et al., J. Mol. Biol. 150:1 (1981), which are incorporated by reference herein in their entireties.

[0268] The expression levels of an antibody molecule can be increased by vector amplification (for a review, see Bebbington and Hentschel, The use of vectors based on gene amplification for the expression of cloned genes in mammalian cells in DNA cloning, Vol.3. (Academic Press, New York, 1987)). When a marker in the vector system expressing antibody is amplifiable, increase in the level of inhibitor present in culture of host cell will increase the number of copies of the marker gene. Since the amplified region is associated with the antibody gene, production of the antibody will also increase (Crouse et al., Mol. Cell. Biol. 3:257 (1983)).

[0269] Vectors which use glutamine synthase (GS) or DHFR as the selectable markers can be amplified in the presence of the drugs methionine sulphoximine or methotrexate, respectively. An advantage of glutamine synthase based vectors are the availabilty of cell lines (e.g., the murine myeloma cell line, NSO) which are glutamine synthase negative. Glutamine synthase expression systems can also function in glutamine synthase expressing cells (e.g. Chinese Hamster Ovary (CHO) cells) by providing additional inhibitor to prevent the functioning of the endogenous gene. A glutamine synthase expression system and components thereof are detailed in PCT publications: WO87/04462; WO86/05807; WO89/01036; WO89/10404; and WO91/06657 which are incorporated in their entireties by reference herein. Additionally, glutamine synthase expression vectors that may be used according to the present invention are commercially available from suplliers, including, for example Lonza Biologics, Inc. (Portsmouth, N.H.). Expression and production of monoclonal antibodies using a GS expression system in murine myeloma cells is described in Bebbington et al., Bio/technology 10:169(1992) and in Biblia and Robinson Biotechnol. Prog. 11:1 (1995) which are incorporated in their entirities by reference herein.

[0270] The host cell may be co-transfected with two expression vectors of the invention, the first vector encoding a heavy chain derived polypeptide and the second vector encoding a light chain derived polypeptide. The two vectors may contain identical selectable markers which enable equal expression of heavy and light chain polypeptides. Alternatively, a single vector may be used which encodes, and is capable of expressing, both heavy and light chain polypeptides. In such situations, the light chain should be placed before the heavy chain to avoid an excess of toxic free heavy chain (Proudfoot, Nature 322:52 (1986); Kohler, Proc. Natl. Acad. Sci. USA 77:2197 (1980)). The coding sequences for the heavy and light chains may comprise cDNA or genomic DNA.

[0271] Once an antibody molecule of the invention has been produced by an animal, chemically synthesized, or recombinantly expressed, it may be purified by any method known in the art for purification of an immunoglobulin molecule, for example, by chromatography (e.g., ion exchange, affinity, particularly by affinity for the specific antigen after Protein A, and sizing column chromatography), centrifugation, differential solubility, or by any other standard technique for the purification of proteins. In addition, the antibodies of the present invention or fragments thereof can be fused to heterologous polypeptide sequences described herein or otherwise known in the art, to facilitate purification.

[0272] The present invention encompasses antibodies recombinantly fused or chemically conjugated (including both covalently and non-covalently conjugations) to a polypeptide (or portion thereof, preferably at least 10, 20, 30, 40, 50, 60, 70, 80, 90 or 100 amino acids of the polypeptide) of the present invention to generate fusion proteins. The fusion does not necessarily need to be direct, but may occur through linker sequences. The antibodies may be specific for antigens other than polypeptides (or portion thereof, preferably at least 10, 20, 30, 40, 50, 60, 70, 80, 90 or 100 amino acids of the polypeptide) of the present invention. For example, antibodies may be used to target the polypeptides of the present invention to particular cell types, either in vitro or in vivo, by fusing or conjugating the polypeptides of the present invention to antibodies specific for particular cell surface receptors. Antibodies fused or conjugated to the polypeptides of the present invention may also be used in in vitro immunoassays and purification methods using methods known in the art. See e.g., Harbor et al., supra, and PCT publication WO 93/21232; EP 439,095; Naramura et al., Immunol. Lett. 39:91-99 (1994); U.S. Pat. No. 5,474,981; Gillies et al., PNAS 89:1428-1432 (1992); Fell et al., J. Immunol. 146:2446-2452 (1991), which are incorporated by reference in their entireties.

[0273] The present invention further includes compositions comprising the polypeptides of the present invention fused or conjugated to antibody domains other than the variable regions. For example, the polypeptides of the present invention may be fused or conjugated to an antibody Fe region, or portion thereof. The antibody portion fused to a polypeptide of the present invention may comprise the constant region, hinge region, CH1 domain, CH2 domain, and CH3 domain or any combination of whole domains or portions thereof. The polypeptides may also be fused or conjugated to the above antibody portions to form multimers. For example, Fc portions fused to the polypeptides of the present invention can form dimers through disulfide bonding between the Fc portions. Higher multimeric forms can be made by fusing the polypeptides to portions of IgA and IgM. Methods for fusing or conjugating the polypeptides of the present invention to antibody portions are known in the art. See, e.g., U.S. Pat. Nos. 5,336,603; 5,622,929; 5,359,046; 5,349,053; 5,447,851; 5,112,946; EP 307,434; EP 367,166; PCT publications WO 96/04388; WO 91/06570; Ashkenazi et al., Proc. Natl. Acad. Sci. USA 88:10535-10539 (1991); Zheng et al., J. Immunol. 154:5590-5600 (1995); and Vil et al., Proc. Natl. Acad. Sci. USA 89:11337-11341 (1992) (said references incorporated by reference in their entireties).

[0274] As discussed, supra, the polypeptides corresponding to a polypeptide, polypeptide fragment, or a variant of SEQ ID NO:Y may be fused or conjugated to the above antibody portions to increase the in vivo half life of the polypeptides or for use in immunoassays using methods known in the art. Further, the polypeptides corresponding to SEQ ID NO:Y may be fused or conjugated to the above antibody portions to facilitate purification. One reported example describes chimeric proteins consisting of the first two domains of the human CD4-polypeptide and various domains of the constant regions of the heavy or light chains of mammalian immunoglobulins. See EP 394,827; and Traunecker et al., Nature 331:84-86 (1988). The polypeptides of the present invention fused or conjugated to an antibody having disulfide-linked dimeric structures (due to the IgG) may also be more efficient in binding and neutralizing other molecules, than the monomeric secreted protein or protein fragment alone. See, for example, Fountoulakis et al., J. Biochem. 270:3958-3964 (1995). In many cases, the Fc part in a fusion protein is beneficial in therapy and diagnosis, and thus can result in, for example, improved pharmacokinetic properties. See, for example, EP A 232,262. Alternatively, deleting the Fe part after the fusion protein has been expressed, detected, and purified, would be desired. For example, the Fc portion may hinder therapy and diagnosis if the fusion protein is used as an antigen for immunizations. In drug discovery, for example, human proteins, such as hIL-5, have been fused with Fc portions for the purpose of high-throughput screening assays to identify antagonists of hIL-5. (See, Bennett et al., J. Molecular Recognition 8:52-58 (1995); Johanson et al., J. Biol. Chem. 270:9459-9471 (1995)).

[0275] Moreover, the antibodies or fragments thereof of the present invention can be fused to marker sequences, such as a peptide to facilitate purification. In preferred embodiments, the marker amino acid sequence is a hexa-histidine peptide, such as the tag provided in a pQE vector (QIAGEN, Inc., 9259 Eton Avenue, Chatsworth, Calif., 91311), among others, many of which are commercially available. As described in Gentz et al., Proc. Natl. Acad. Sci. USA 86:821-824 (1989), for instance, hexa-histidine provides for convenient purification of the fusion protein. Other peptide tags useful for purification include, but are not limited to, the “HA” tag, which corresponds to an epitope derived from the influenza hemagglutinin protein (Wilson et al., Cell 37:767 (1984)) and the “flag” tag.

[0276] The present invention further encompasses antibodies or fragments thereof conjugated to a diagnostic or therapeutic agent. The antibodies can be used diagnostically to, for example, monitor the development or progression of a tumor as part of a clinical testing procedure to, e.g., determine the efficacy of a given treatment regimen. Detection can be facilitated by coupling the antibody to a detectable substance. Examples of detectable substances include various enzymes, prosthetic groups, fluorescent materials, luminescent materials, bioluminescent materials, radioactive materials, positron emitting metals using various positron emission tomographies, and nonradioactive paramagnetic metal ions. The detectable substance may be coupled or conjugated either directly to the antibody (or fragment thereof) or indirectly, through an intermediate (such as, for example, a linker known in the art) using techniques known in the art. See, for example, U.S. Pat. No. 4,741,900 for metal ions which can be conjugated to antibodies for use as diagnostics according to the present invention. Examples of suitable enzymes include horseradish peroxidase, alkaline phosphatase, beta-galactosidase, or acetylcholinesterase; examples of suitable prosthetic group complexes include streptavidin/biotin and avidin/biotin; examples of suitable fluorescent materials include umbelliferone, fluorescein, fluorescein isothiocyanate, rhodamine, dichlorotriazinylamine fluorescein, dansyl chloride or phycoerythrin; an example of a luminescent material includes luminol; examples of bioluminescent materials include luciferase, luciferin, and aequorin; and examples of suitable radioactive material include 125I, 131I, 111In or 99Tc.

[0277] Further, an antibody or fragment thereof may be conjugated to a therapeutic moiety such as a cytotoxin, e.g., a cytostatic or cytocidal agent, a therapeutic agent or a radioactive metal ion, e.g., alpha-emitters such as, for example, 213Bi. A cytotoxin or cytotoxic agent includes any agent that is detrimental to cells. Examples include paclitaxol, cytochalasin B, gramicidin D, ethidium bromide, emetine, mitomycin, etoposide, tenoposide, vincristine, vinblastine, colchicin, doxorubicin, daunorubicin, dihydroxy anthracin dione, mitoxantrone, mithramycin, actinomycin D, 1-dehydrotestosterone, glucocorticoids, procaine, tetracaine, lidocaine, propranolol, and puromycin and analogs or homologs thereof. Therapeutic agents include, but are not limited to, antimetabolites (e.g., methotrexate, 6-mercaptopurine, 6-thioguanine, cytarabine, 5-fluorouracil decarbazine), alkylating agents (e.g., mechlorethamine, thioepa chlorambucil, melphalan, carmustine (BSNU) and lomustine (CCNU), cyclothosphamide, busulfan, dibromomannitol, streptozotocin, mitomycin C, and cis- dichlorodiamine platinum (II) (DDP) cisplatin), anthracyclines (e.g., daunorubicin (formerly daunomycin) and doxorubicin), antibiotics (e.g., dactinomycin (formerly actinomycin), bleomycin, mithramycin, and anthramycin (AMC)), and anti-mitotic agents (e.g., vincristine and vinblastine).

[0278] The conjugates of the invention can be used for modifying a given biological response, the therapeutic agent or drug moiety is not to be construed as limited to classical chemical therapeutic agents. For example, the drug moiety may be a protein or polypeptide possessing a desired biological activity. Such proteins may include, for example, a toxin such as abrin, ricin A, pseudomonas exotoxin, or diphtheria toxin; a protein such as tumor necrosis factor, a-interferon, B-interferon, nerve growth factor, platelet derived growth factor, tissue plasminogen activator, an apoptotic agent, e.g., TNF-alpha, TNF-beta, AIM I (See, International Publication No. WO 97/33899), AIM II (See, International Publication No. WO 97/34911), Fas Ligand (Takahashi et al., Int. Immunol., 6:1567-1574 (1994)), VEGI (See, International Publication No. WO 99/23105), a thrombotic agent or an anti-angiogenic agent, e.g., angiostatin or endostatin; or, biological response modifiers such as, for example, lymphokines, interleukin-1 (“IL-1”), interleukin-2 (“IL-2”), interleukin-6 (“IL-6”), granulocyte macrophage colony stimulating factor (“GM-CSF”), granulocyte colony stimulating factor (“G-CSF”), or other growth factors.

[0279] Antibodies may also be attached to solid supports, which are particularly useful for immunoassays or purification of the target antigen. Such solid supports include, but are not limited to, glass, cellulose, polyacrylamide, nylon, polystyrene, polyvinyl chloride or polypropylene.

[0280] Techniques for conjugating such therapeutic moiety to antibodies are well known. See, for example, Arnon et al., “Monoclonal Antibodies For Immunotargeting Of Drugs In Cancer Therapy”, in Monoclonal Antibodies And Cancer Therapy, Reisfeld et al. (eds.), pp. 243-56 (Alan R. Liss, Inc. 1985); Hellstrom et al., “Antibodies For Drug Delivery”, in Controlled Drug Delivery (2nd Ed.), Robinson et al. (eds.), pp. 623-53 (Marcel Dekker, Inc. 1987); Thorpe, “Antibody Carriers Of Cytotoxic Agents In Cancer Therapy: A Review”, in Monoclonal Antibodies '84: Biological And Clinical Applications, Pinchera et al. (eds.), pp. 475-506 (1985); “Analysis, Results, And Future Prospective Of The Therapeutic Use Of Radiolabeled Antibody In Cancer Therapy”, in Monoclonal Antibodies For Cancer Detection And Therapy, Baldwin et al. (eds.), pp. 303-16 (Academic Press 1985), and Thorpe et al., “The Preparation And Cytotoxic Properties Of Antibody-Toxin Conjugates”, Immunol. Rev. 62:119-58 (1982).

[0281] Alternatively, an antibody can be conjugated to a second antibody to form an antibody heteroconjugate as described by Segal in U.S. Pat. No. 4,676,980, which is incorporated herein by reference in its entirety.

[0282] An antibody, with or without a therapeutic moiety conjugated to it, administered alone or in combination with cytotoxic factor(s) and/or cytokine(s) can be used as a therapeutic.

[0283] Immunophenotyping

[0284] The antibodies of the invention may be utilized for immunophenotyping of cell lines and biological samples. Translation products of the gene of the present invention may be useful as cell-specific markers, or more specifically as cellular markers that are differentially expressed at various stages of differentiation and/or maturation of particular cell types. Monoclonal antibodies directed against a specific epitope, or combination of epitopes, will allow for the screening of cellular populations expressing the marker. Various techniques can be utilized using monoclonal antibodies to screen for cellular populations expressing the marker(s), and include magnetic separation using antibody-coated magnetic beads, “panning” with antibody attached to a solid matrix (i.e., plate), and flow cytometry (See, e.g., U.S. Pat. No. 5,985,660; and Morrison et al., Cell, 96:737-49 (1999)).

[0285] These techniques allow for the screening of particular populations of cells, such as might be found with hematological malignancies (i.e. minimal residual disease (MRD) in acute leukemic patients) and “non-self” cells in transplantations to prevent Graft-versus-Host Disease (GVHD). Alternatively, these techniques allow for the screening of hematopoietic stem and progenitor cells capable of undergoing proliferation and/or differentiation, as might be found in human umbilical cord blood.

[0286] Assays for Antibody Binding

[0287] The antibodies of the invention may be assayed for immunospecific binding by any method known in the art. The immunoassays which can be used include but are not limited to competitive and non-competitive assay systems using techniques such as western blots, radioimmunoassays, ELISA (enzyme linked immunosorbent assay), “sandwich” immunoassays, immunoprecipitation assays, precipitin reactions, gel diffusion precipitin reactions, immunodiffusion assays, agglutination assays, complement-fixation assays, immunoradiometric assays, fluorescent immunoassays, and protein A immunoassays, to name but a few. Such assays are routine and well known in the art (see, e.g., Ausubel et al, eds, 1994, Current Protocols in Molecular Biology, Vol. 1, John Wiley & Sons, Inc., New York, which is incorporated by reference herein in its entirety). Exemplary immunoassays are described briefly below (but are not intended by way of limitation).

[0288] Immunoprecipitation protocols generally comprise lysing a population of cells in a lysis buffer such as RIPA buffer (1% NP-40 or Triton X-100, 1% sodium deoxycholate, 0.1% SDS, 0.15 M NaCl, 0.01 M sodium phosphate at pH 7.2, 1% Trasylol) supplemented with protein phosphatase and/or protease inhibitors (e.g., EDTA, PMSF, aprotinin, sodium vanadate), adding the antibody of interest to the cell lysate, incubating for a period of time (e.g., 1-4 hours) at 4° C., adding protein A and/or protein G sepharose beads to the cell lysate, incubating for about an hour or more at 4° C., washing the beads in lysis buffer and resuspending the beads in SDS/sample buffer. The ability of the antibody of interest to immunoprecipitate a particular antigen can be assessed by, e.g., western blot analysis. One of skill in the art would be knowledgeable as to the parameters that can be modified to increase the binding of the antibody to an antigen and decrease the background (e.g., pre-clearing the cell lysate with sepharose beads). For further discussion regarding immunoprecipitation protocols see, e.g., Ausubel et al., eds., (1994), Current Protocols in Molecular Biology, Vol. 1, John Wiley & Sons, Inc., New York, section 10.16.1.

[0289] Western blot analysis generally comprises preparing protein samples, electrophoresis of the protein samples in a polyacrylamide gel (e.g., 8%-20% SDS-PAGE depending on the molecular weight of the antigen), transferring the protein sample from the polyacrylamide gel to a membrane such as nitrocellulose, PVDF or nylon, blocking the membrane in blocking solution (e.g., PBS with 3% BSA or non-fat milk), washing the membrane in washing buffer (e.g., PBS-Tween 20), blocking the membrane with primary antibody (the antibody of interest) diluted in blocking buffer, washing the membrane in washing buffer, blocking the membrane with a secondary antibody (which recognizes the primary antibody, e.g., an anti-human antibody) conjugated to an enzymatic substrate (e.g., horseradish peroxidase or alkaline phosphatase) or radioactive molecule (e.g., 32P or 125I) diluted in blocking buffer, washing the membrane in wash buffer, and detecting the presence of the antigen. One of skill in the art would be knowledgeable as to the parameters that can be modified to increase the signal detected and to reduce the background noise. For further discussion regarding western blot protocols see, e.g., Ausubel et al, eds, (1994), Current Protocols in Molecular Biology, Vol. 1, John Wiley & Sons, Inc., New York, section 10.8.1.

[0290] ELISAs comprise preparing antigen, coating the well of a 96 well microtiter plate with the antigen, adding the antibody of interest conjugated to a detectable compound such as an enzymatic substrate (e.g., horseradish peroxidase or alkaline phosphatase) to the well and incubating for a period of time, and detecting the presence of the antigen. In ELISAs the antibody of interest does not have to be conjugated to a detectable compound; instead, a second antibody (which recognizes the antibody of interest) conjugated to a detectable compound may be added to the well. Further, instead of coating the well with the antigen, the antibody may be coated to the well. In this case, a second antibody conjugated to a detectable compound may be added following the addition of the antigen of interest to the coated well. One of skill in the art would be knowledgeable as to the parameters that can be modified to increase the signal detected as well as other variations of ELISAs known in the art. For further discussion regarding ELISAs see, e.g., Ausubel et al, eds, (1994), Current Protocols in Molecular Biology, Vol. 1, John Wiley & Sons, Inc., New York, section 11.2.1.

[0291] The binding affinity of an antibody to an antigen and the off-rate of an antibody-antigen interaction can be determined by competitive binding assays. One example of a competitive binding assay is a radioimmunoassay comprising the incubation of labeled antigen (e.g., 3H or 125I) with the antibody of interest in the presence of increasing amounts of unlabeled antigen, and the detection of the antibody bound to the labeled antigen. The affinity of the antibody of interest for a particular antigen and the binding off-rates can be determined from the data by scatchard plot analysis. Competition with a second antibody can also be determined using radioimmunoassays. In this case, the antigen is incubated with antibody of interest conjugated to a labeled compound (e.g., 3H or 125I) in the presence of increasing amounts of an unlabeled second antibody.

[0292] Antibodies of the invention may be characterized using immunocytochemisty methods on cells (e.g., mammalian cells, such as CHO cells) transfected with a vector enabling the expression of an antigen or with vector alone using techniques commonly known in the art. Antibodies that bind antigen transfected cells, but not vector-only transfected cells, are antigen specific.

[0293] Therapeutic Uses

[0294] The present invention is further directed to antibody-based therapies which involve administering antibodies of the invention to an animal, preferably a mammal, and most preferably a human, patient for treating one or more of the disclosed diseases, disorders, or conditions. Therapeutic compounds of the invention include, but are not limited to, antibodies of the invention (including fragments, analogs and derivatives thereof as described herein) and nucleic acids encoding antibodies of the invention (including fragments, analogs and derivatives thereof and anti-idiotypic antibodies as described herein). The antibodies of the invention can be used to treat, inhibit or prevent diseases, disorders or conditions associated with aberrant expression and/or activity of a polypeptide of the invention, including, but not limited to, any one or more of the diseases, disorders, or conditions described herein. The treatment and/or prevention of diseases, disorders, or conditions associated with aberrant expression and/or activity of a polypeptide of the invention includes, but is not limited to, alleviating symptoms associated with those diseases, disorders or conditions. Antibodies of the invention may be provided in pharmaceutically acceptable compositions as known in the art or as described herein.

[0295] In a specific and preferred embodiment, the present invention is directed to antibody-based therapies which involve administering antibodies of the invention to an animal, preferably a mammal, and most preferably a human, patient for treating one or more diseases, disorders, or conditions, including but not limited to: neural disorders, immune system disorders, muscular disorders, reproductive disorders, gastrointestinal disorders, pulmonary disorders, cardiovascular disorders, renal disorders, proliferative disorders, and/or cancerous diseases and conditions., and/or as described elsewhere herein. Therapeutic compounds of the invention include, but are not limited to, antibodies of the invention (e.g., antibodies directed to the full length protein expressed on the cell surface of a mammalian cell; antibodies directed to an epitope of a polypeptide of the invention (such as, for example, a predicted linear epitope shown in column 7 of Table 1A; or a conformational epitope, including fragments, analogs and derivatives thereof as described herein) and nucleic acids encoding antibodies of the invention (including fragments, analogs and derivatives thereof and anti-idiotypic antibodies as described herein). The antibodies of the invention can be used to treat, inhibit or prevent diseases, disorders or conditions associated with aberrant expression and/or activity of a polypeptide of the invention, including, but not limited to, any one or more of the diseases, disorders, or conditions described herein. The treatment and/or prevention of diseases, disorders, or conditions associated with aberrant expression and/or activity of a polypeptide of the invention includes, but is not limited to, alleviating symptoms associated with those diseases, disorders or conditions. Antibodies of the invention may be provided in pharmaceutically acceptable compositions as known in the art or as described herein.

[0296] A summary of the ways in which the antibodies of the present invention may be used therapeutically includes binding polynucleotides or polypeptides of the present invention locally or systemically in the body or by direct cytotoxicity of the antibody, e.g. as mediated by complement (CDC) or by effector cells (ADCC). Some of these approaches are described in more detail below. Armed with the teachings provided herein, one of ordinary skill in the art will know how to use the antibodies of the present invention for diagnostic, monitoring or therapeutic purposes without undue experimentation.

[0297] The antibodies of this invention may be advantageously utilized in combination with other monoclonal or chimeric antibodies, or with lymphokines or hematopoietic growth factors (such as, e.g., IL-2, IL-3 and IL-7), for example, which serve to increase the number or activity of effector cells which interact with the antibodies.

[0298] The antibodies of the invention may be administered alone or in combination with other types of treatments (e.g., radiation therapy, chemotherapy, hormonal therapy, immunotherapy and anti-tumor agents). Generally, administration of products of a species origin or species reactivity (in the case of antibodies) that is the same species as that of the patient is preferred. Thus, in a preferred embodiment, human antibodies, fragments derivatives, analogs, or nucleic acids, are administered to a human patient for therapy or prophylaxis.

[0299] It is preferred to use high affinity and/or potent in vivo inhibiting and/or neutralizing antibodies against polypeptides or polynucleotides of the present invention, fragments or regions thereof, for both immunoassays directed to and therapy of disorders related to polynucleotides or polypeptides, including fragments thereof, of the present invention. Such antibodies, fragments, or regions, will preferably have an affinity for polynucleotides or polypeptides of the invention, including fragments thereof. Preferred binding affinities include those with a dissociation constant or Kd less than 5×10⁻² M, 10⁻² M, 5×10⁻³ M, 10⁻³ M, 5×10⁻⁴ M, 10⁻⁴ M, 5×10⁻⁵ M, 10⁻⁵ M, 5×10⁻⁶ M, 10⁻⁶ M, 5×10⁻⁷ M, 10⁻⁷ M, 5×10⁻⁸ M, 10⁻⁸ M, 5×10⁻⁹ M, 10⁻⁹ M, 5×10⁻¹⁰ M, 10⁻¹⁰ M, 5×10⁻¹¹ M, 10⁻¹¹ M, 5×10⁻¹² M, 10⁻¹² M, 5×10⁻¹³ M, 10⁻¹³ M, 5×10⁻¹⁴ M, 10⁻¹⁴ M, 5×10⁻¹⁵ M, and 10⁻¹⁵ M.

[0300] Gene Therapy

[0301] In a specific embodiment, nucleic acids comprising sequences encoding antibodies or functional derivatives thereof, are administered to treat, inhibit or prevent a disease or disorder associated with aberrant expression and/or activity of a polypeptide of the invention, by way of gene therapy. Gene therapy refers to therapy performed by the administration to a subject of an expressed or expressible nucleic acid. In this embodiment of the invention, the nucleic acids produce their encoded protein that mediates a therapeutic effect.

[0302] Any of the methods for gene therapy available in the art can be used according to the present invention. Exemplary methods are described below.

[0303] For general reviews of the methods of gene therapy, see Goldspiel et al., Clinical Pharmacy 12:488-505 (1993); Wu and Wu, Biotherapy 3:87-95 (1991); Tolstoshev, Ann. Rev. Pharmacol. Toxicol. 32:573-596 (1993); Mulligan, Science 260:926-932 (1993); and Morgan and Anderson, Ann. Rev. Biochem. 62:191-217 (1993); May, TIBTECH 11(5):155-215 (1993). Methods commonly known in the art of recombinant DNA technology which can be used are described in Ausubel et al. (eds.), Current Protocols in Molecular Biology, John Wiley & Sons, NY (1993); and Kriegler, Gene Transfer and Expression, A Laboratory Manual, Stockton Press, NY (1990).

[0304] In a preferred embodiment, the compound comprises nucleic acid sequences encoding an antibody, said nucleic acid sequences being part of expression vectors that express the antibody or fragments or chimeric proteins or heavy or light chains thereof in a suitable host. In particular, such nucleic acid sequences have promoters operably linked to the antibody coding region, said promoter being inducible or constitutive, and, optionally, tissue-specific. In another particular embodiment, nucleic acid molecules are used in which the antibody coding sequences and any other desired sequences are flanked by regions that promote homologous recombination at a desired site in the genome, thus providing for intrachromosomal expression of the antibody encoding nucleic acids (Koller and Smithies, Proc. Natl. Acad. Sci. USA 86:8932-8935 (1989); Zijlstra et al., Nature 342:435-438 (1989). In specific embodiments, the expressed antibody molecule is a single chain antibody; alternatively, the nucleic acid sequences include sequences encoding both the heavy and light chains, or fragments thereof, of the antibody.

[0305] Delivery of the nucleic acids into a patient may be either direct, in which case the patient is directly exposed to the nucleic acid or nucleic acid- carrying vectors, or indirect, in which case, cells are first transformed with the nucleic acids in vitro, then transplanted into the patient. These two approaches are known, respectively, as in vivo or ex vivo gene therapy.

[0306] In a specific embodiment, the nucleic acid sequences are directly administered in vivo, where it is expressed to produce the encoded product. This can be accomplished by any of numerous methods known in the art, e.g., by constructing them as part of an appropriate nucleic acid expression vector and administering it so that they become intracellular, e.g., by infection using defective or attenuated retrovirals or other viral vectors (see U.S. Pat. No. 4,980,286), or by direct injection of naked DNA, or by use of microparticle bombardment (e.g., a gene gun; Biolistic, Dupont), or coating with lipids or cell-surface receptors or transfecting agents, encapsulation in liposomes, microparticles, or microcapsules, or by administering them in linkage to a peptide which is known to enter the nucleus, by administering it in linkage to a ligand subject to receptor-mediated endocytosis (see, e.g., Wu and Wu, J. Biol. Chem. 262:4429-4432 (1987)) (which can be used to target cell types specifically expressing the receptors), etc. In another embodiment, nucleic acid-ligand complexes can be formed in vvhich the ligand comprises a fusogenic viral peptide to disrupt endosomes, allowing the nucleic acid to avoid lysosomal degradation. In yet another embodiment, the nucleic acid can be targeted in vivo for cell specific uptake and expression, by targeting a specific receptor (see, e.g., PCT Publications WO 92/06180; WO 92/22635; WO92/20316; WO93/14188, WO 93/20221). Alternatively, the nucleic acid can be introduced intracellularly and incorporated within host cell DNA for expression, by homologous recombination (Koller and Smithies, Proc. Natl. Acad. Sci. USA 86:8932-8935 (1989); Zijlstra et al., Nature 342:435-438 (1989)).

[0307] In a specific embodiment, viral vectors that contains nucleic acid sequences encoding an antibody of the invention are used. For example, a retroviral vector can be used (see Miller et al., Meth. Enzymol. 217:581-599 (1993)). These retroviral vectors contain the components necessary for the correct packaging of the viral genome and integration into the host cell DNA. The nucleic acid sequences encoding the antibody to be used in gene therapy are cloned into one or more vectors, which facilitates delivery of the gene into a patient. More detail about retroviral vectors can be found in Boesen et al., Biotherapy 6:291-302 (1994), which describes the use of a retroviral vector to deliver the mdr1 gene to hematopoietic stem cells in order to make the stem cells more resistant to chemotherapy. Other references illustrating the use of retroviral vectors in gene therapy are: Clowes et al., J. Clin. Invest. 93:644-651 (1994); Kiem et al., Blood 83:1467-1473 (1994); Salmons and Gunzberg, Human Gene Therapy 4:129-141 (1993); and Grossman and Wilson, Curr. Opin. in Genetics and Devel. 3:110-114 (1993).

[0308] Adenoviruses are other viral vectors that can be used in gene therapy. Adenoviruses are especially attractive vehicles for delivering genes to respiratory epithelia. Adenoviruses naturally infect respiratory epithelia where they cause a mild disease. Other targets for adenovirus-based delivery systems are liver, the central nervous system, endothelial cells, and muscle. Adenoviruses have the advantage of being capable of infecting non-dividing cells. Kozarsky and Wilson, Current Opinion in Genetics and Development 3:499-503 (1993) present a review of adenovirus-based gene therapy. Bout et al., Human Gene Therapy 5:3-10 (1994) demonstrated the use of adenovirus vectors to transfer genes to the respiratory epithelia of rhesus monkeys. Other instances of the use of adenoviruses in gene therapy can be found in Rosenfeld et al., Science 252:431-434 (1991); Rosenfeld et al., Cell 68:143-155 (1992); Mastrangeli et al., J. Clin. Invest. 91:225-234 (1993); PCT Publication WO94/12649; and Wang, et al., Gene Therapy 2:775-783 (1995). In a preferred embodiment, adenovirus vectors are used.

[0309] Adeno-associated virus (AAV) has also been proposed for use in gene therapy (Walsh et al., Proc. Soc. Exp. Biol. Med. 204:289-300 (1993); U.S. Pat. No. 5,436,146).

[0310] Another approach to gene therapy involves transferring a gene to cells in tissue culture by such methods as electroporation, lipofection, calcium phosphate mediated transfection, or viral infection. Usually, the method of transfer includes the transfer of a selectable marker to the cells. The cells are then placed under selection to isolate those cells that have taken up and are expressing the transferred gene. Those cells are then delivered to a patient.

[0311] In this embodiment, the nucleic acid is introduced into a cell prior to administration in vivo of the resulting recombinant cell. Such introduction can be carried out by any method known in the art, including but not limited to transfection, electroporation, microinjection, infection with a viral or bacteriophage vector containing the nucleic acid sequences, cell fusion, chromosome-mediated gene transfer, microcell-mediated gene transfer, spheroplast fusion, etc. Numerous techniques are known in the art for the introduction of foreign genes into cells (see, e.g., Loeffler and Behr, Meth. Enzymol. 217:599-618 (1993); Cohen et al., Meth. Enzymol. 217:618-644 (1993); Cline, Pharmac. Ther. 29:69-92 m (1985) and may be used in accordance with the present invention, provided that the necessary developmental and physiological functions of the recipient cells are not disrupted. The technique should provide for the stable transfer of the nucleic acid to the cell, so that the nucleic acid is expressible by the cell and preferably heritable and expressible by its cell progeny.

[0312] The resulting recombinant cells can be delivered to a patient by various methods known in the art. Recombinant blood cells (e.g., hematopoietic stem or progenitor cells) are preferably administered intravenously. The amount of cells envisioned for use depends on the desired effect, patient state, etc., and can be determined by one skilled in the art.

[0313] Cells into which a nucleic acid can be introduced for purposes of gene therapy encompass any desired, available cell type, and include but are not limited to epithelial cells, endothelial cells, keratinocytes, fibroblasts, muscle cells, hepatocytes; blood cells such as T lymphocytes, B lymphocytes, monocytes, macrophages, neutrophils, eosinophils, megakaryocytes, granulocytes; various stem or progenitor cells, in particular hematopoietic stem or progenitor cells, e.g., as obtained from bone marrow, umbilical cord blood, peripheral blood, fetal liver, etc.

[0314] In a preferred embodiment, the cell used for gene therapy is autologous to the patient.

[0315] In an embodiment in which recombinant cells are used in gene therapy, nucleic acid sequences encoding an antibody are introduced into the cells such that they are expressible by the cells or their progeny, and the recombinant cells are then administered in vivo for therapeutic effect. In a specific embodiment, stem or progenitor cells are used. Any stem and/or progenitor cells which can be isolated and maintained in vitro can potentially be used in accordance with this embodiment of the present invention (see e.g. PCT Publication WO 94/08598; Stemple and Anderson, Cell 71:973-985 (1992); Rheinwald, Meth. Cell Bio. 21A:229 (1980); and Pittelkow and Scott, Mayo Clinic Proc. 61:771 (1986)).

[0316] In a specific embodiment, the nucleic acid to be introduced for purposes of gene therapy comprises an inducible promoter operably linked to the coding region, such that expression of the nucleic acid is controllable by the presence or absence of an appropriate inducer of transcription.

[0317] Demonstration of Therapeutic or Prophylactic Activity

[0318] The compounds or pharmaceutical compositions of the invention are preferably tested in vitro, and then in vivo for the desired therapeutic or prophylactic activity, prior to use in humans. For example, in vitro assays to demonstrate the therapeutic or prophylactic utility of a compound or pharmaceutical composition include, the effect of a compound on a cell line or a patient tissue sample. The effect of the compound or composition on the cell line and/or tissue sample can be determined utilizing techniques known to those of skill in the art including, but not limited to, rosette formation assays and cell lysis assays. In accordance with the invention, in vitro assays which can be used to determine whether administration of a specific compound is indicated, include in vitro cell culture assays in which a patient tissue sample is grown in culture, and exposed to or otherwise administered a compound, and the effect of such compound upon the tissue sample is observed.

[0319] Therapeutic/Prophylactic Administration and Composition

[0320] The invention provides methods of treatment, inhibition and prophylaxis by administration to a subject of an effective amount of a compound or pharmaceutical composition of the invention, preferably a polypeptide or antibody of the invention. In a preferred embodiment, the compound is substantially purified (e.g., substantially free from substances that limit its effect or produce undesired side-effects). The subject is preferably an animal, including but not limited to animals such as cows, pigs, horses, chickens, cats, dogs, etc., and is preferably a mammal, and most preferably human.

[0321] Formulations and methods of administration that can be employed when the compound comprises a nucleic acid or an immunoglobulin are described above; additional appropriate formulations and routes of administration can be selected from among those described herein below.

[0322] Various delivery systems are known and can be used to administer a compound of the invention, e.g., encapsulation in liposomes, microparticles, microcapsules, recombinant cells capable of expressing the compound, receptor-mediated endocytosis (see, e.g., Wu and Wu, J. Biol. Chem. 262:4429-4432 (1987)), construction of a nucleic acid as part of a retroviral or other vector, etc. Methods of introduction include but are not limited to intradermal, intramuscular, intraperitoneal, intravenous, subcutaneous, intranasal, epidural, and oral routes. The compounds or compositions may be administered by any convenient route, for example by infusion or bolus injection, by absorption through epithelial or mucocutaneous linings (e.g., oral mucosa, rectal and intestinal mucosa, etc.) and may be administered together with other biologically active agents. Administration can be systemic or local. In addition, it may be desirable to introduce the pharmaceutical compounds or compositions of the invention into the central nervous system by any suitable route, including intraventricular and intrathecal injection; intraventricular injection may be facilitated by an intraventricular catheter, for example, attached to a reservoir, such as an Ommaya reservoir. Pulmonary administration can also be employed, e.g., by use of an inhaler or nebulizer, and formulation with an aerosolizing agent.

[0323] In a specific embodiment, it may be desirable to administer the pharmaceutical compounds or compositions of the invention locally to the area in need of treatment; this may be achieved by, for example, and not by way of limitation, local infusion during surgery, topical application, e.g., in conjunction with a wound dressing after surgery, by injection, by means of a catheter, by means of a suppository, or by means of an implant, said implant being of a porous, non-porous, or gelatinous material, including membranes, such as sialastic membranes, or fibers. Preferably, when administering a protein, including an antibody, of the invention, care must be taken to use materials to which the protein does not absorb.

[0324] In another embodiment, the compound or composition can be delivered in a vesicle, in particular a liposome (see Langer, Science 249:1527-1533 (1990); Treat et al., in Liposomes in the Therapy of Infectious Disease and Cancer, Lopez-Berestein and Fidler (eds.), Liss, New York, pp. 353-365 (1989); Lopez-Berestein, ibid., pp. 317-327; see generally ibid.)

[0325] In yet another embodiment, the compound or composition can be delivered in a controlled release system. In one embodiment, a pump may be used (see Langer, supra; Sefton, CRC Crit. Ref. Biomed. Eng. 14:201 (1987); Buchwald et al., Surgery 88:507 (1980); Saudek et al., N. Engl. J. Med. 321:574 (1989)). In another embodiment, polymeric materials can be used (see Medical Applications of Controlled Release, Langer and Wise (eds.), CRC Pres., Boca Raton, Florida (1974); Controlled Drug Bioavailability, Drug Product Design and Performance, Smolen and Ball (eds.), Wiley, New York (1984); Ranger and Peppas, J., Macromol. Sci. Rev. Macromol. Chem. 23:61 (1983); see also Levy et al., Science 228:190 (1985); During et al., Ann. Neurol. 25:351 (1989); Howard et al., J. Neurosurg. 71:105 (1989)). In yet another embodiment, a controlled release system can be placed in proximity of the therapeutic target, e.g., the brain, thus requiring only a fraction of the systemic dose (see, e.g., Goodson, in Medical Applications of Controlled Release, supra, vol. 2, pp. 115-138 (1984)).

[0326] Other controlled release systems are discussed in the review by Langer (Science 249:1527-1533 (1990)).

[0327] In a specific embodiment where the compound of the invention is a nucleic acid encoding a protein, the nucleic acid can be administered in vivo to promote expression of its encoded protein, by constructing it as part of an appropriate nucleic acid expression vector and administering it so that it becomes intracellular, e.g., by use of a retroviral vector (see U.S. Pat. No. 4,980,286), or by direct injection, or by use of microparticle bombardment (e.g., a gene gun; Biolistic, Dupont), or coating with lipids or cell-surface receptors or transfecting agents, or by administering it in linkage to a homeobox- like peptide which is known to enter the nucleus (see e.g., Joliot et al., Proc. Natl. Acad. Sci. USA 88:1864-1868 (1991)), etc. Alternatively, a nucleic acid can be introduced intracellularly and incorporated within host cell DNA for expression, by homologous recombination.

[0328] The present invention also provides pharmaceutical compositions. Such compositions comprise a therapeutically effective amount of a compound, and a pharmaceutically acceptable carrier. In a specific embodiment, the term “pharmaceutically acceptable” means approved by a regulatory agency of the Federal or a state government or listed in the U.S. Pharmacopeia or other generally recognized pharmacopeia for use in animals, and more particularly in humans. The term “carrier” refers to a diluent, adjuvant, excipient, or vehicle with which the therapeutic is administered. Such pharmaceutical carriers can be sterile liquids, such as water and oils, including those of petroleum, animal, vegetable or synthetic origin, such as peanut oil, soybean oil, mineral oil, sesame oil and the like. Water is a preferred carrier when the pharmaceutical composition is administered intravenously. Saline solutions and aqueous dextrose and glycerol solutions can also be employed as liquid carriers, particularly for injectable solutions. Suitable pharmaceutical excipients include starch, glucose, lactose, sucrose, gelatin, malt, rice, flour, chalk, silica gel, sodium stearate, glycerol monostearate, talc, sodium chloride, dried skim milk, glycerol, propylene, glycol, water, ethanol and the like. The composition, if desired, can also contain minor amounts of wetting or emulsifying agents, or pH buffering agents. These compositions can take the form of solutions, suspensions, emulsion, tablets, pills, capsules, powders, sustained-release formulations and the like. The composition can be formulated as a suppository, with traditional binders and carriers such as triglycerides. Oral formulation can include standard carriers such as pharmaceutical grades of mannitol, lactose, starch, magnesium stearate, sodium saccharine, cellulose, magnesium carbonate, etc. Examples of suitable pharmaceutical carriers are described in “Remington's Pharmaceutical Sciences” by E. W. Martin. Such compositions will contain a therapeutically effective amount of the compound, preferably in purified form, together with a suitable amount of carrier so as to provide the form for proper administration to the patient. The formulation should suit the mode of administration.

[0329] In a preferred embodiment, the composition is formulated in accordance with routine procedures as a pharmaceutical composition adapted for intravenous administration to human beings. Typically, compositions for intravenous administration are solutions in sterile isotonic aqueous buffer. Where necessary, the composition may also include a solubilizing agent and a local anesthetic such as lignocaine to ease pain at the site of the injection. Generally, the ingredients are supplied either separately or mixed together in unit dosage form, for example, as a dry lyophilized powder or water free concentrate in a hermetically sealed container such as an ampoule or sachette indicating the quantity of active agent. Where the composition is to be administered by infusion, it can be dispensed with an infusion bottle containing sterile pharmaceutical grade water or saline. Where the composition is administered by injection, an ampoule of sterile water for injection or saline can be provided so that the ingredients may be mixed prior to administration.

[0330] The compounds of the invention can be formulated as neutral or salt forms. Pharmaceutically acceptable salts include those formed with anions such as those derived from hydrochloric, phosphoric, acetic, oxalic, tartaric acids, etc., and those formed with cations such as those derived from sodium, potassium, ammonium, calcium, ferric hydroxides, isopropylamine, triethylamine, 2-ethylamino ethanol, histidine, procaine, etc.

[0331] The amount of the compound of the invention which will be effective in the treatment, inhibition and prevention of a disease or disorder associated with aberrant expression and/or activity of a polypeptide of the invention can be determined by standard clinical techniques. In addition, in vitro assays may optionally be employed to help identify optimal dosage ranges. The precise dose to be employed in the formulation will also depend on the route of administration, and the seriousness of the disease or disorder, and should be decided according to the judgment of the practitioner and each patient's circumstances. Effective doses may be extrapolated from dose-response curves derived from in vitro or animal model test systems.

[0332] For antibodies, the dosage administered to a patient is typically 0.1 mg/kg to 100 mg/kg of the patient's body weight. Preferably, the dosage administered to a patient is between 0.1 mg/kg and 20 mg/kg of the patient's body weight, more preferably 1 mg/kg to 10 mg/kg of the patient's body weight. Generally, human antibodies have a longer half-life within the human body than antibodies from other species due to the immune response to the foreign polypeptides. Thus, lower dosages of human antibodies and less frequent administration is often possible. Further, the dosage and frequency of administration of antibodies of the invention may be reduced by enhancing uptake and tissue penetration (e.g., into the brain) of the antibodies by modifications such as, for example, lipidation.

[0333] The invention also provides a pharmaceutical pack or kit comprising one or more containers filled with one or more of the ingredients of the pharmaceutical compositions of the invention. Optionally associated with such container(s) can be a notice in the form prescribed by a governmental agency regulating the manufacture, use or sale of pharmaceuticals or biological products, which notice reflects approval by the agency of manufacture, use or sale for human administration.

[0334] Diagnosis and Imaging

[0335] Labeled antibodies, and derivatives and analogs thereof, which specifically bind to a polypeptide of interest can be used for diagnostic purposes to detect, diagnose, or monitor diseases, disorders, and/or conditions associated with the aberrant expression and/or activity of a polypeptide of the invention. The invention provides for the detection of aberrant expression of a polypeptide of interest, comprising (a) assaying the expression of the polypeptide of interest in cells or body fluid of an individual using one or more antibodies specific to the polypeptide interest and (b) comparing the level of gene expression with a standard gene expression level, whereby an increase or decrease in the assayed polypeptide gene expression level compared to the standard expression level is indicative of aberrant expression.

[0336] The invention provides a diagnostic assay for diagnosing a disorder, comprising (a) assaying the expression of the polypeptide of interest in cells or body fluid of an individual using one or more antibodies specific to the polypeptide interest and (b) comparing the level of gene expression with a standard gene expression level, whereby an increase or decrease in the assayed polypeptide gene expression level compared to the standard expression level is indicative of a particular disorder. With respect to cancer, the presence of a relatively high amount of transcript in biopsied tissue from an individual may indicate a predisposition for the development of the disease, or may provide a means for detecting the disease prior to the appearance of actual clinical symptoms. A more definitive diagnosis of this type may allow health professionals to employ preventative measures or aggressive treatment earlier thereby preventing the development or further progression of the cancer.

[0337] Antibodies of the invention can be used to assay protein levels in a biological sample using classical immunohistological methods known to those of skill in the art (e.g., see Jalkanen et al., J. Cell. Biol. 101:976-985 (1985); Jalkanen et al., J. Cell . Biol. 105:3087-3096 (1987)). Other antibody-based methods useful for detecting protein gene expression include immunoassays, such as the enzyme linked immunosorbent assay (ELISA) and the radioimmunoassay (RIA). Suitable antibody assay labels are known in the art and include enzyme labels, such as, glucose oxidase; radioisotopes, such as iodine (125I, 121I), carbon (14C), sulfur (35S), tritium (3H), indium (112In), and technetium (99Tc); luminescent labels, such as luminol; and fluorescent labels, such as fluorescein and rhodamine, and biotin.

[0338] One facet of the invention is the detection and diagnosis of a disease or disorder associated with aberrant expression of a polypeptide of interest in an animal, preferably a mammal and most preferably a human. In one embodiment, diagnosis comprises: a) administering (for example, parenterally, subcutaneously, or intraperitoneally) to a subject an effective amount of a labeled molecule which specifically binds to the polypeptide of interest; b) waiting for a time interval following the administering for permitting the labeled molecule to preferentially concentrate at sites in the subject where the polypeptide is expressed (and for unbound labeled molecule to be cleared to background level); c) determining background level; and d) detecting the labeled molecule in the subject, such that detection of labeled molecule above the background level indicates that the subject has a particular disease or disorder associated with aberrant expression of the polypeptide of interest. Background level can be determined by various methods including, comparing the amount of labeled molecule detected to a standard value previously determined for a particular system.

[0339] It will be understood in the art that the size of the subject and the imaging system used will determine the quantity of imaging moiety needed to produce diagnostic images. In the case of a radioisotope moiety, for a human subject, the quantity of radioactivity injected will normally range from about 5 to 20 millicuries of 99 mTc. The labeled antibody or antibody fragment will then preferentially accumulate at the location of cells which contain the specific protein. In vivo tumor imaging is described in S. W. Burchiel et al., “Immunopharmacokinetics of Radiolabeled Antibodies and Their Fragments.” (Chapter 13 in Tumor Imaging: The Radiochemical Detection of Cancer, S. W. Burchiel and B. A. Rhodes, eds., Masson Publishing Inc. (1982)).

[0340] Depending on several variables, including the type of label used and the mode of administration, the time interval following the administration for permitting the labeled molecule to preferentially concentrate at sites in the subject and for unbound labeled molecule to be cleared to background level is 6 to 48 hours or 6 to 24 hours or 6 to 12 hours. In another embodiment the time interval following administration is 5 to 20 days or 5 to 10 days.

[0341] In an embodiment, monitoring of the disease or disorder is carried out by repeating the method for diagnosing the disease or disease, for example, one month after initial diagnosis, six months after initial diagnosis, one year after initial diagnosis, etc.

[0342] Presence of the labeled molecule can be detected in the patient using methods known in the art for in vivo scanning. These methods depend upon the type of label used. Skilled artisans will be able to determine the appropriate method for detecting a particular label. Methods and devices that may be used in the diagnostic methods of the invention include, but are not limited to, computed tomography (CT), whole body scan such as position emission tomography (PET), magnetic resonance imaging (MRI), and sonography.

[0343] In a specific embodiment, the molecule is labeled with a radioisotope and is detected in the patient using a radiation responsive surgical instrument (Thurston et al., U.S. Pat. No. 5,441,050). In another embodiment, the molecule is labeled with a fluorescent compound and is detected in the patient using a fluorescence responsive scanning instrument. In another embodiment, the molecule is labeled with a positron emitting metal and is detected in the patent using positron emission-tomography. In yet another embodiment, the molecule is labeled with a paramagnetic label and is detected in a patient using magnetic resonance imaging (MRI).

[0344] Kits

[0345] The present invention provides kits that can be used in the above methods. In one embodiment, a kit comprises an antibody of the invention, preferably a purified antibody, in one or more containers. In a specific embodiment, the kits of the present invention contain a substantially isolated polypeptide comprising an epitope which is specifically immunoreactive with an antibody included in the kit. Preferably, the kits of the present invention further comprise a control antibody which does not react with the polypeptide of interest. In another specific embodiment, the kits of the present invention contain a means for detecting the binding of an antibody to a polypeptide of interest (e.g., the antibody may be conjugated to a detectable substrate such as a fluorescent compound, an enzymatic substrate, a radioactive compound or a luminescent compound, or a second antibody which recognizes the first antibody may be conjugated to a detectable substrate).

[0346] In another specific embodiment of the present invention, the kit is a diagnostic kit for use in screening serum containing antibodies specific against proliferative and/or cancerous polynucleotides and polypeptides. Such a kit may include a control antibody that does not react with the polypeptide of interest. Such a kit may include a substantially isolated polypeptide antigen comprising an epitope which is specifically immunoreactive with at least one anti-polypeptide antigen antibody. Further, such a kit includes means for detecting the binding of said antibody to the antigen (e.g., the antibody may be conjugated to a fluorescent compound such as fluorescein or rhodamine which can be detected by flow cytometry). In specific embodiments, the kit may include a recombinantly produced or chemically synthesized polypeptide antigen. The polypeptide antigen of the kit may also be attached to a solid support.

[0347] In a more specific embodiment the detecting means of the above-described kit includes a solid support to which said polypeptide antigen is attached. Such a kit may also include a non-attached reporter-labeled anti-human antibody. In this embodiment, binding of the antibody to the polypeptide antigen can be detected by binding of the said reporter-labeled antibody.

[0348] In an additional embodiment, the invention includes a diagnostic kit for use in screening serum containing antigens of the polypeptide of the invention. The diagnostic kit includes a substantially isolated antibody specifically immunoreactive with polypeptide or polynucleotide antigens, and means for detecting the binding of the polynucleotide or polypeptide antigen to the antibody. In one embodiment, the antibody is attached to a solid support. In a specific embodiment, the antibody may be a monoclonal antibody. The detecting means of the kit may include a second, labeled monoclonal antibody. Alternatively, or in addition, the detecting means may include a labeled, competing antigen.

[0349] In one diagnostic configuration, test serum is reacted with a solid phase reagent having a surface-bound antigen obtained by the methods of the present invention. After binding with specific antigen antibody to the reagent and removing unbound serum components by washing, the reagent is reacted with reporter-labeled anti-human antibody to bind reporter to the reagent in proportion to the amount of bound anti-antigen antibody on the solid support. The reagent is again washed to remove unbound labeled antibody, and the amount of reporter associated with the reagent is determined. Typically, the reporter is an enzyme which is detected by incubating the solid phase in the presence of a suitable fluorometric, luminescent or colorimetric substrate (Sigma, St. Louis, Mo.).

[0350] The solid surface reagent in the above assay is prepared by known techniques for attaching protein material to solid support material, such as polymeric beads, dip sticks, 96-well plate or filter material. These attachment methods generally include non-specific adsorption of the protein to the support or covalent attachment of the protein, typically through a free amine group, to a chemically reactive group on the solid support, such as an activated carboxyl, hydroxyl, or aldehyde group. Alternatively, streptavidin coated plates can be used in conjunction with biotinylated antigen(s).

[0351] Thus, the invention provides an assay system or kit for carrying out this diagnostic method. The kit generally includes a support with surface- bound recombinant antigens, and a reporter-labeled anti-human antibody for detecting surface-bound anti-antigen antibody.

[0352] Uses of the Polynucleotides

[0353] Each of the polynucleotides identified herein can be used in numerous ways as reagents. The following description should be considered exemplary and utilizes known techniques.

[0354] The polynucleotides of the present invention are useful for chromosome identification. There exists an ongoing need to identify new chromosome markers, since few chromosome marking reagents, based on actual sequence data (repeat polymorphisms), are presently available. Each sequence is specifically targeted to and can hybridize with a particular location on an individual human chromosome, thus each polynucleotide of the present invention can routinely be used as a chromosome marker using techniques known in the art. Table 1A, column 9 provides the chromosome location of some of the polynucleotides of the invention.

[0355] Briefly, sequences can be mapped to chromosomes by preparing PCR primers (preferably at least 15 bp (e.g., 15-25 bp) from the sequences shown in SEQ ID NO:X. Primers can optionally be selected using computer analysis so that primers do not span more than one predicted exon in the genomic DNA. These primers are then used for PCR screening of somatic cell hybrids containing individual human chromosomes. Only those hybrids containing the human gene corresponding to SEQ ID NO:X will yield an amplified fragment.

[0356] Similarly, somatic hybrids provide a rapid method of PCR mapping the polynucleotides to particular chromosomes. Three or more clones can be assigned per day using a single thermal cycler. Moreover, sublocalization of the polynucleotides can be achieved with panels of specific chromosome fragments. Other gene mapping strategies that can be used include in situ hybridization, prescreening with labeled flow-sorted chromosomes, preselection by hybridization to construct chromosome specific-cDNA libraries, and computer mapping techniques (See, e.g., Shuler, Trends Biotechnol 16:456-459 (1998) which is hereby incorporated by reference in its entirety).

[0357] Precise chromosomal location of the polynucleotides can also be achieved using fluorescence in situ hybridization (FISH) of a metaphase chromosomal spread. This technique uses polynucleotides as short as 500 or 600 bases; however, polynucleotides 2,000-4,000 bp are preferred. For a review of this technique, see Verma et al., “Human Chromosomes: a Manual of Basic Techniques,” Pergamon Press, New York (1988).

[0358] For chromosome mapping, the polynucleotides can be used individually (to mark a single chromosome or a single site on that chromosome) or in panels (for marking multiple sites and/or multiple chromosomes).

[0359] Thus, the present invention also provides a method for chromosomal localization which involves (a) preparing PCR primers from the polynucleotide sequences in Table 1A and/or Table 2 and SEQ ID NO:X and (b) screening somatic cell hybrids containing individual chromosomes.

[0360] The polynucleotides of the present invention would likewise be useful for radiation hybrid mapping, HAPPY mapping, and long range restriction mapping. For a review of these techniques and others known in the art, see, e.g. Dear, “Genome Mapping: A Practical Approach,” IRL Press at Oxford University Press, London (1997); Aydin, J. Mol. Med. 77:691-694 (1999); Hacia et al., Mol. Psychiatry 3:483-492 (1998); Herrick et al., Chromosome Res. 7:409-423 (1999); Hamilton et al., Methods Cell Biol. 62:265-280 (2000); and/or Ott, J. Hered. 90:68-70 (1999) each of which is hereby incorporated by reference in its entirety.

[0361] Once a polynucleotide has been mapped to a precise chromosomal location, the physical position of the polynucleotide can be used in linkage analysis. Linkage analysis establishes coinheritance between a chromosomal location and presentation of a particular disease. (Disease mapping data are found, for example, in V. McKusick, Mendelian Inheritance in Man (available on line through Johns Hopkins University Welch Medical Library)). Column 10 of Table 1A provides an OMIM reference identification number of diseases associated with the cytologic band disclosed in column 9 of Table 1A, as determined using techniques described herein and by reference to Table 5. Assuming 1 megabase mapping resolution and one gene per 20 kb, a cDNA precisely localized to a chromosomal region associated with the disease could be one of 50-500 potential causative genes.

[0362] Thus, once coinheritance is established, differences in a polynucleotide of the invention and the corresponding gene between affected and unaffected individuals can be examined. First, visible structural alterations in the chromosomes, such as deletions or translocations, are examined in chromosome spreads or by PCR. If no structural alterations exist, the presence of point mutations are ascertained. Mutations observed in some or all affected individuals, but not in normal individuals, indicates that the mutation may cause the disease. However, complete sequencing of the polypeptide and the corresponding gene from several normal individuals is required to distinguish the mutation from a polymorphism. If a new polymorphism is identified, this polymorphic polypeptide can be used for further linkage analysis.

[0363] Furthermore, increased or decreased expression of the gene in affected individuals as compared to unaffected individuals can be assessed using the polynucleotides of the invention. Any of these alterations (altered expression, chromosomal rearrangement, or mutation) can be used as a diagnostic or prognostic marker. Diagnostic and prognostic methods, kits and reagents encompassed by the present invention are briefly described below and more thoroughly elsewhere herein (see e.g., the sections labeled “Antibodies”, “Diagnostic Assays”, and “Methods for Detecting Diseases”).

[0364] Thus, the invention also provides a diagnostic method useful during diagnosis of a disorder, involving measuring the expression level of polynucleotides of the present invention in cells or body fluid from an individual and comparing the measured gene expression level with a standard level of polynucleotide expression level, whereby an increase or decrease in the gene expression level compared to the standard is indicative of a disorder. Additional non-limiting examples of diagnostic methods encompassed by the present invention are more thoroughly described elsewhere herein (see, e.g., Example 12).

[0365] In still another embodiment, the invention includes a kit for analyzing samples for the presence of proliferative and/or cancerous polynucleotides derived from a test subject. In a general embodiment, the kit includes at least one polynucleotide probe containing a nucleotide sequence that will specifically hybridize with a polynucleotide of the invention and a suitable container. In a specific embodiment, the kit includes two polynucleotide probes defining an internal region of the polynucleotide of the invention, where each probe has one strand containing a 31′mer-end internal to the region. In a further embodiment, the probes may be useful as primers for polymerase chain reaction amplification.

[0366] Where a diagnosis of a related disorder, including, for example, diagnosis of a tumor, has already been made according to conventional methods, the present invention is useful as a prognostic indicator, whereby patients exhibiting enhanced or depressed polynucleotide of the invention expression will experience a worse clinical outcome relative to patients expressing the gene at a level nearer the standard level.

[0367] By “measuring the expression level of polynucleotides of the invention” is intended qualitatively or quantitatively measuring or estimating the level of the polypeptide of the invention or the level of the mRNA encoding the polypeptide of the invention in a first biological sample either directly (e.g., by determining or estimating absolute protein level or mRNA level) or relatively (e.g., by comparing to the polypeptide level or mRNA level in a second biological sample). Preferably, the polypeptide level or mRNA level in the first biological sample is measured or estimated and compared to a standard polypeptide level or mRNA level, the standard being taken from a second biological sample obtained from an individual not having the related disorder or being determined by averaging levels from a population of individuals not having a related disorder. As will be appreciated in the art, once a standard polypeptide level or mRNA level is known, it can be used repeatedly as a standard for comparison.

[0368] By “biological sample” is intended any biological sample obtained from an individual, body fluid, cell line, tissue culture, or other source which contains polypeptide of the present invention or the corresponding mRNA. As indicated, biological samples include body fluids (such as semen, lymph, vaginal pool, sera, plasma, urine, synovial fluid and spinal fluid) which contain the polypeptide of the present invention, and tissue sources found to express the polypeptide of the present invention. Methods for obtaining tissue biopsies and body fluids from mammals are well known in the art. Where the biological sample is to include mRNA, a tissue biopsy is the preferred source.

[0369] The method(s) provided above may preferably be applied in a diagnostic method and/or kits in which polynucleotides and/or polypeptides of the invention are attached to a solid support. In one exemplary method, the support may be a “gene chip” or a “biological chip” as described in U.S. Pat. Nos. 5,837,832, 5,874,219, and 5,856,174. Further, such a gene chip with polynucleotides of the invention attached may be used to identify polymorphisms between the isolated polynucleotide sequences of the invention, with polynucleotides isolated from a test subject. The knowledge of such polymorphisms (i.e. their location, as well as, their existence) would be beneficial in identifying disease loci for many disorders, such as for example, in neural disorders, immune system disorders, muscular disorders, reproductive disorders, gastrointestinal disorders, pulmonary disorders, digestive disorders, metabolic disorders, cardiovascular disorders, renal disorders, proliferative disorders, and/or cancerous diseases and conditions. Such a method is described in U.S. Pat. Nos. 5,858,659 and 5,856,104. The US Patents referenced supra are hereby incorporated by reference in their entirety herein.

[0370] The present invention encompasses polynucleotides of the present invention that are chemically synthesized, or reproduced as peptide nucleic acids (PNA), or according to other methods known in the art. The use of PNAs would serve as the preferred form if the polynucleotides of the invention are incorporated onto a solid support, or gene chip. For the purposes of the present invention, a peptide nucleic acid (PNA) is a polyamide type of DNA analog and the monomeric units for adenine, guanine, thymine and cytosine are available commercially (Perceptive Biosystems). Certain components of DNA, such as phosphorus, phosphorus oxides, or deoxyribose derivatives, are not present in PNAs. As disclosed by Nielsen et al., Science 254, 1497 (1991); and Egholm et al., Nature 365, 666 (1993), PNAs bind specifically and tightly to complementary DNA strands and are not degraded by nucleases. In fact, PNA binds more strongly to DNA than DNA itself does. This is probably because there is no electrostatic repulsion between the two strands, and also the polyamide backbone is more flexible. Because of this, PNA/DNA duplexes bind under a wider range of stringency conditions than DNA/DNA duplexes, making it easier to perform multiplex hybridization. Smaller probes can be used than with DNA due to the strong binding. In addition, it is more likely that single base mismatches can be determined with PNA/DNA hybridization because a single mismatch in a PNA/DNA 15-mer lowers the melting point (T.sub.m) by 8°-20° C., vs. 4°-16° C. for the DNA/DNA 15-mer duplex. Also, the absence of charge groups in PNA means that hybridization can be done at low ionic strengths and reduce possible interference by salt during the analysis.

[0371] The compounds of the present invention have uses which include, but are not limited to, detecting cancer in mammals. In particular the invention is useful during diagnosis of pathological cell proliferative neoplasias which include, but are not limited to: acute myelogenous leukemias including acute monocytic leukemia, acute myeloblastic leukemia, acute promyelocytic leukemia, acute myelomonocytic leukemia, acute erythroleukemia, acute megakaryocytic leukemia, and acute undifferentiated leukemia, etc.; and chronic myelogenous leukemias including chronic myelomonocytic leukemia, chronic granulocytic leukemia, etc. Preferred mammals include monkeys, apes, cats, dogs, cows, pigs, horses, rabbits and humans. Particularly preferred are humans.

[0372] Pathological cell proliferative disorders are often associated with inappropriate activation of proto-oncogenes. (Gelmann, E. P. et al., “The Etiology of Acute Leukemia: Molecular Genetics and Viral Oncology,” in Neoplastic Diseases of the Blood, Vol 1., Wiemik, P. H. et al. eds., 161-182 (1985)). Neoplasias are now believed to result from the qualitative alteration of a normal cellular gene product, or from the quantitative modification of gene expression by insertion into the chromosome of a viral sequence, by chromosomal translocation of a gene to a more actively transcribed region, or by some other mechanism. (Gelmann et al., supra) It is likely that mutated or altered expression of specific genes is involved in the pathogenesis of some leukemias, among other tissues and cell types. (Gelmann et al., supra) Indeed, the human counterparts of the oncogenes involved in some animal neoplasias have been amplified or translocated in some cases of human leukemia and carcinoma. (Gelmann et al., supra)

[0373] For example, c-myc expression is highly amplified in the non-lymphocytic leukemia cell line HL-60. When HL-60 cells are chemically induced to stop proliferation, the level of c-myc is found to be downregulated. (International Publication Number WO 91/15580). However, it has been shown that exposure of HL-60 cells to a DNA construct that is complementary to the 5′ end of c-myc or c-myb blocks translation of the corresponding mRNAs which downregulates expression of the c-myc or c-myb proteins and causes arrest of cell proliferation and differentiation of the treated cells. (International Publication Number WO 91/15580; Wickstrom et al., Proc. Natl. Acad. Sci. 85:1028 (1988); Anfossi et al., Proc. Natl. Acad. Sci. 86:3379 (1989)). However, the skilled artisan would appreciate the present invention's usefulness is not be limited to treatment, prevention, and/or prognosis of proliferative disorders of cells and tissues of hematopoietic origin, in light of the numerous cells and cell types of varying origins which are known to exhibit proliferative phenotypes.

[0374] In addition to the foregoing, a polynucleotide of the present invention can be used to control gene expression through triple helix formation or through antisense DNA or RNA. Antisense techniques are discussed, for example, in Okano, J. Neurochem. 56: 560 (1991); “Oligodeoxynucleotides as Antisense Inhibitors of Gene Expression, CRC Press, Boca Raton, Fla. (1988). Triple helix formation is discussed in, for instance Lee et al., Nucleic Acids Research 6: 3073 (1979); Cooney et al., Science 241: 456 (1988); and Dervan et al., Science 251: 1360 (1991). Both methods rely on binding of the polynucleotide to a complementary DNA or RNA. For these techniques, preferred polynucleotides are usually oligonucleotides 20 to 40 bases in length and complementary to either the region of the gene involved in transcription (triple helix—see Lee et al., Nucl. Acids Res. 6:3073 (1979); Cooney et al., Science 241:456 (1988); and Dervan et al., Science 251:1360 (1991)) or to the mRNA itself (antisense—Okano, J. Neurochem. 56:560 (1991); Oligodeoxy-nucleotides as Antisense Inhibitors of Gene Expression, CRC Press, Boca Raton, Fla. (1988)). Triple helix formation optimally results in a shut-off of RNA transcription from DNA, while antisense RNA hybridization blocks translation of an mRNA molecule into polypeptide. The oligonucleotide described above can also be delivered to cells such that the antisense RNA or DNA may be expressed in vivo to inhibit production of polypeptide of the present invention antigens. Both techniques are effective in model systems, and the information disclosed herein can be used to design antisense or triple helix polynucleotides in an effort to treat disease, and in particular, for the treatment of proliferative diseases and/or conditions. Non-limiting antisense and triple helix methods encompassed by the present invention are more thoroughly described elsewhere herein (see, e.g., the section labeled “Antisense and Ribozyme (Antagonists)”).

[0375] Polynucleotides of the present invention are also useful in gene therapy. One goal of gene therapy is to insert a normal gene into an organism having a defective gene, in an effort to correct the genetic defect. The polynucleotides disclosed in the present invention offer a means of targeting such genetic defects in a highly accurate manner. Another goal is to insert a new gene that was not present in the host genome, thereby producing a new trait in the host cell. Additional non-limiting examples of gene therapy methods encompassed by the present invention are more thoroughly described elsewhere herein (see, e.g., the sections labeled “Gene Therapy Methods”, and Examples 16, 17 and 18).

[0376] The polynucleotides are also useful for identifying individuals from minute biological samples. The United States military, for example, is considering the use of restriction fragment length polymorphism (RFLP) for identification of its personnel. In this technique, an individual's genomic DNA is digested with one or more restriction enzymes, and probed on a Southern blot to yield unique bands for identifying personnel. This method does not suffer from the current limitations of “Dog Tags” which can be lost, switched, or stolen, making positive identification difficult. The polynucleotides of the present invention can be used as additional DNA markers for RFLP.

[0377] The polynucleotides of the present invention can also be used as an alternative to RFLP, by determining the actual base-by-base DNA sequence of selected portions of an individual's genome. These sequences can be used to prepare PCR primers for amplifying and isolating such selected DNA, which can then be sequenced. Using this technique, individuals can be identified because each individual will have a unique set of DNA sequences. Once an unique ID database is established for an individual, positive identification of that individual, living or dead, can be made from extremely small tissue samples.

[0378] Forensic biology also benefits from using DNA-based identification techniques as disclosed herein. DNA sequences taken from very small biological samples such as tissues, e.g., hair or skin, or body fluids, e.g., blood, saliva, semen, synovial fluid, amniotic fluid, breast milk, lymph, pulmonary sputum or surfactant, urine, fecal matter, etc., can be amplified using PCR. In one prior art technique, gene sequences amplified from polymorphic loci, such as DQa class II HLA gene, are used in forensic biology to identify individuals. (Erlich, H., PCR Technology, Freeman and Co. (1992)). Once these specific polymorphic loci are amplified, they are digested with one or more restriction enzymes, yielding an identifying set of bands on a Southern blot probed with DNA corresponding to the DQa class II HLA gene. Similarly, polynucleotides of the present invention can be used as polymorphic markers for forensic purposes.

[0379] There is also a need for reagents capable of identifying the source of a particular tissue. Such need arises, for example, in forensics when presented with tissue of unknown origin. Appropriate reagents can comprise, for example, DNA probes or primers prepared from the sequences of the present invention, specific to tissues, including but not limited to those shown in Table 1A. Panels of such reagents can identify tissue by species and/or by organ type. In a similar fashion, these reagents can be used to screen tissue cultures for contamination. Additional non-limiting examples of such uses are further described herein.

[0380] The polynucleotides of the present invention are also useful as hybridization probes for differential identification of the tissue(s) or cell type(s) present in a biological sample. Similarly, polypeptides and antibodies directed to polypeptides of the present invention are useful to provide immunological probes for differential identification of the tissue(s) (e.g., immunohistochemistry assays) or cell type(s) (e.g., immunocytochemistry assays). In addition, for a number of disorders of the above tissues or cells, significantly higher or lower levels of gene expression of the polynucleotides/polypeptides of the present invention may be detected in certain tissues (e.g., tissues expressing polypeptides and/or polynucleotides of the present invention, for example, those disclosed in column 8 of Table 1A, and/or cancerous and/or wounded tissues) or bodily fluids (e.g., semen, lymph, vaginal pool, serum, plasma, urine, synovial fluid or spinal fluid) taken from an individual having such a disorder, relative to a “standard” gene expression level, i.e., the expression level in healthy tissue from an individual not having the disorder.

[0381] Thus, the invention provides a diagnostic method of a disorder, which involves: (a) assaying gene expression level in cells or body fluid of an individual; (b) comparing the gene expression level with a standard gene expression level, whereby an increase or decrease in the assayed gene expression level compared to the standard expression level is indicative of a disorder.

[0382] In the very least, the polynucleotides of the present invention can be used as molecular weight markers on Southern gels, as diagnostic probes for the presence of a specific mRNA in a particular cell type, as a probe to “subtract-out” known sequences in the process of discovering novel polynucleotides, for selecting and making oligomers for attachment to a “gene chip” or other support, to raise anti-DNA antibodies using DNA immunization techniques, and as an antigen to elicit an immune response.

[0383] Uses of the Polypeptides

[0384] Each of the polypeptides identified herein can be used in numerous ways. The following description should be considered exemplary and utilizes known techniques.

[0385] Polypeptides and antibodies directed to polypeptides of the present invention are useful to provide immunological probes for differential identification of the tissue(s) (e.g., immunohistochemistry assays such as, for example, ABC immunoperoxidase (Hsu et al., J. Histochem. Cytochem. 29:577-580 (1981)) or cell type(s) (e.g., immunocytochemistry assays).

[0386] Antibodies can be used to assay levels of polypeptides encoded by polynucleotides of the invention in a biological sample using classical immunohistological methods known to those of skill in the art (e.g., see Jalkanen, et al., J. Cell. Biol. 101:976-985 (1985); Jalkanen, et al., J. Cell. Biol. 105:3087-3096 (1987)). Other antibody-based methods useful for detecting protein gene expression include immunoassays, such as the enzyme linked immunosorbent assay (ELISA) and the radioimmunoassay (RIA). Suitable antibody assay labels are known in the art and include enzyme labels, such as, glucose oxidase; radioisotopes, such as iodine (311I, 125I, 123I, 121I), carbon (¹⁴C), sulfur (35S), tritium (3%), indium (^{115m}In, ^{113m}In, ¹¹²In, ¹¹¹In), and technetium (⁹⁹Tc, ^{99m}Tc), thallium (²⁰¹Ti), gallium (⁶⁸Ga, ⁶⁷Ga), palladium (¹⁰³Pd), molybdenum (⁹⁹Mo), xenon (¹³³Xe), fluorine (¹⁸F), ¹⁵³sM, ¹⁷⁷Lu, ¹⁵⁹Gd, ¹⁴⁹Pm, ¹⁴⁰La, ¹⁷⁵Yb, ¹⁶⁶Ho, ⁹⁰y, ⁴⁷SC, ¹⁸⁶Re, 188Re, ¹⁴²Pr, 105h ⁹⁷Ru; luminescent labels, such as luminol; and fluorescent labels, such as fluorescein and rhodamine, and biotin.

[0387] In addition to assaying levels of polypeptide of the present invention in a biological sample, proteins can also be detected in vivo by imaging. Antibody labels or markers for in vivo imaging of protein include those detectable by X-radiography, NMR or ESR. For X-radiography, suitable labels include radioisotopes such as barium or cesium, which emit detectable radiation but are not overtly harmful to the subject. Suitable markers for NMR and ESR include those with a detectable characteristic spin, such as deuterium, which may be incorporated into the antibody by labeling of nutrients for the relevant hybridoma.

[0388] A protein-specific antibody or antibody fragment which has been labeled with an appropriate detectable imaging moiety, such as a radioisotope (for example, 131I, ¹¹²In, ^{99m}Tc, (131I, 125I, 123I, 121I), carbon (¹⁴C), sulfur (35S), tritium (³H), indium (^{115m}In, ^{113m}In, ¹¹²In, ¹¹¹In), and technetium (⁹⁹Tc, ^{99m}Tc), thallium (²⁰¹Ti), gallium (68Ga, ⁶⁷Ga), palladium (¹⁰³ Pd), molybdenum (⁹⁹Mo), xenon (¹³³Xe), fluorine (¹⁸F, ¹⁵³Sm, 177Lu, ¹⁵⁹Gd, ¹⁴⁹Pm, ¹⁴⁰La, ¹⁷⁵Yb, ¹⁶⁶Ho, ⁹⁰Y, ⁴⁷Sc, ¹⁸⁶Re, ¹⁸⁸R 142 Pr, 105 Rh, ⁹⁷Ru), a radio-opaque substance, or a material detectable by nuclear magnetic resonance, is introduced (for example, parenterally, subcutaneously or intraperitoneally) into the mammal to be examined for immune system disorder. It will be understood in the art that the size of the subject and the imaging system used will determine the quantity of imaging moiety needed to produce diagnostic images. In the case of a radioisotope moiety, for a human subject, the quantity of radioactivity injected will normally range from about 5 to 20 millicuries of ^{99m}Tc. The labeled antibody or antibody fragment will then preferentially accumulate at the location of cells which express the polypeptide encoded by a polynucleotide of the invention. In vivo tumor imaging is described in S.W. Burchiel et al., “Immunopharmacokinetics of Radiolabeled Antibodies and Their Fragments” (Chapter 13 in Tumor Imaging: The Radiochemical Defection of Cancer, S. W. Burchiel and B. A. Rhodes, eds., Masson Publishing Inc. (1982)).

[0389] In one embodiment, the invention provides a method for the specific delivery of compositions of the invention to cells by administering polypeptides of the invention (e.g., polypeptides encoded by polynucleotides of the invention and/or antibodies) that are associated with heterologous polypeptides or nucleic acids. In one example, the invention provides a method for delivering a therapeutic protein into the targeted cell. In another example, the invention provides a method for delivering a single stranded nucleic acid (e.g., antisense or ribozymes) or double stranded nucleic acid (e.g., DNA that can integrate into the cell's genome or replicate episomally and that can be transcribed) into the targeted cell.

[0390] In another embodiment, the invention provides a method for the specific destruction of cells (e.g., the destruction of tumor cells) by administering polypeptides of the invention in association with toxins or cytotoxic prodrugs.

[0391] By “toxin” is meant one or more compounds that bind and activate endogenous cytotoxic effector systems, radioisotopes, holotoxins, modified toxins, catalytic subunits of toxins, or any molecules or enzymes not normally present in or on the surface of a cell that under defined conditions cause the cell's death. Toxins that may be used according to the methods of the invention include, but are not limited to, radioisotopes known in the art, compounds such as, for example, antibodies (or complement fixing containing portions thereof) that bind an inherent or induced endogenous cytotoxic effector system, thymidine kinase, endonuclease, RNAse, alpha toxin, ricin, abrin, Pseudomonas exotoxin A, diphtheria toxin, saporin, momordin, gelonin, pokeweed antiviral protein, alpha-sarcin and cholera toxin. “Toxin” also includes a cytostatic or cytocidal agent, a therapeutic agent or a radioactive metal ion, e.g., alpha-emitters such as, for example, ²¹³Bi, or other radioisotopes such as, for example, ¹⁰³Pd, ¹³³Xe, ¹³¹I, ⁶⁸Ge, ⁵⁷Co, ⁶⁵Zn, ⁸⁵Sr, ³²p, ³⁵S, ⁹⁰y, ¹⁵³Sm, ¹⁵³Gd, ¹⁶⁹Y ⁵¹Cr, ⁵⁴Mn, ⁷⁵Se, ¹¹³Sn, ⁹⁰Yttruim, ¹¹⁷Tin, ¹⁸⁶Rhenium, ¹⁶⁶Holmium, and ¹⁸⁸Rhenium; luminescent labels, such as luminol; and fluorescent labels, such as fluorescein and rhodamine, and biotin. In a specific embodiment, the invention provides a method for the specific destruction of cells (e.g., the destruction of tumor cells) by administering polypeptides of the invention or antibodies of the invention in association with the radioisotope ⁹⁰Y. In another specific embodiment, the invention provides a method for the specific destruction of cells (e.g., the destruction of tumor cells) by administering polypeptides of the invention or antibodies of the invention in association with the radioisotope ¹¹¹In. In a further specific embodiment, the invention provides a method for the specific destruction of cells (e.g., the destruction of tumor cells) by administering polypeptides of the invention or antibodies of the invention in association with the radioisotope ¹³¹I.

[0392] Techniques known in the art may be applied to label polypeptides of the invention (including antibodies). Such techniques include, but are not limited to, the use of bifunctional conjugating agents (see e.g., U.S. Pat. Nos. 5,756,065; 5,714,631; 5,696,239; 5,652,361; 5,505,931; 5,489,425; 5,435,990; 5,428,139; 5,342,604; 5,274,119; 4,994,560; and 5,808,003; the contents of each of which are hereby incorporated by reference in its entirety).

[0393] Thus, the invention provides a diagnostic method of a disorder, which involves (a) assaying the expression level of a polypeptide of the present invention in cells or body fluid of an individual; and (b) comparing the assayed polypeptide expression level with a standard polypeptide expression level, whereby an increase or decrease in the assayed polypeptide expression level compared to the standard expression level is indicative of a disorder. With respect to cancer, the presence of a relatively high amount of transcript in biopsied tissue from an individual may indicate a predisposition for the development of the disease, or may provide a means for detecting the disease prior to the appearance of actual clinical symptoms. A more definitive diagnosis of this type may allow health professionals to employ preventative measures or aggressive treatment earlier thereby preventing the development or further progression of the cancer.

[0394] Moreover, polypeptides of the present invention can be used to treat or prevent diseases or conditions such as, for example, neural disorders, immune system disorders, muscular disorders, reproductive disorders, gastrointestinal disorders, pulmonary disorders, cardiovascular disorders, renal disorders, proliferative disorders, and/or cancerous diseases and conditions. For example, patients can be administered a polypeptide of the present invention in an effort to replace absent or decreased levels of the polypeptide (e.g., insulin), to supplement absent or decreased levels of a different polypeptide (e.g., hemoglobin S for hemoglobin B, SOD, catalase, DNA repair proteins), to inhibit the activity of a polypeptide (e.g., an oncogene or tumor supressor), to activate the activity of a polypeptide (e.g., by binding to a receptor), to reduce the activity of a membrane bound receptor by competing with it for free ligand (e.g., soluble TNF receptors used in reducing inflammation), or to bring about a desired response (e.g., blood vessel growth inhibition, enhancement of the immune response to proliferative cells or tissues).

[0395] Similarly, antibodies directed to a polypeptide of the present invention can also be used to treat disease (as described supra, and elsewhere herein). For example, administration of an antibody directed to a polypeptide of the present invention can bind, and/or neutralize the polypeptide, and/or reduce overproduction of the polypeptide. Similarly, administration of an antibody can activate the polypeptide, such as by binding to a polypeptide bound to a membrane (receptor).

[0396] At the very least, the polypeptides of the present invention can be used as molecular weight markers on SDS-PAGE gels or on molecular sieve gel filtration columns using methods well known to those of skill in the art. Polypeptides can also be used to raise antibodies, which in turn are used to measure protein expression from a recombinant cell, as a way of assessing transformation of the host cell. Moreover, the polypeptides of the present invention can be used to test the biological activities described herein.

[0397] Diagnostic Assays

[0398] The compounds of the present invention are useful for diagnosis, treatment, prevention and/or prognosis of various disorders in mammals, preferably humans. Such disorders include, but are not limited to, those described herein under the section heading “Biological Activities”.

[0399] For a number of disorders, substantially altered (increased or decreased) levels of gene expression can be detected in tissues, cells or bodily fluids (e.g., sera, plasma, urine, semen, synovial fluid or spinal fluid) taken from an individual having such a disorder, relative to a “standard” gene expression level, that is, the expression level in tissues or bodily fluids from an individual not having the disorder. Thus, the invention provides a diagnostic method useful during diagnosis of a disorder, which involves measuring the expression level of the gene encoding the polypeptide in tissues, cells or body fluid from an individual and comparing the measured gene expression level with a standard gene expression level, whereby an increase or decrease in the gene expression level(s) compared to the standard is indicative of a disorder. These diagnostic assays may be performed in vivo or in vitro, such as, for example, on blood samples, biopsy tissue or autopsy tissue.

[0400] The present invention is also useful as a prognostic indicator, whereby patients exhibiting enhanced or depressed gene expression will experience a worse clinical outcome relative to patients expressing the gene at a level nearer the standard level.

[0401] In certain embodiments, a polypeptide of the invention, or polynucleotides, antibodies, agonists, or antagonists corresponding to that polypeptide, may be used to diagnose and/or prognose diseases and/or disorders associated with the tissue(s) in which the polypeptide of the invention is expressed, including one, two, three, four, five, or more tissues disclosed in Table 1A, column 8 (Tissue Distribution Library Code).

[0402] By “assaying the expression level of the gene encoding the polypeptide” is intended qualitatively or quantitatively measuring or estimating the level of the polypeptide of the invention or the level of the mRNA encoding the polypeptide of the invention in a first biological sample either directly (e.g., by determining or estimating absolute protein level or mRNA level) or relatively (e.g., by comparing to the polypeptide level or mRNA level in a second biological sample). Preferably, the polypeptide expression level or mRNA level in the first biological sample is measured or estimated and compared to a standard polypeptide level or mRNA level, the standard being taken from a second biological sample obtained from an individual not having the disorder or being determined by averaging levels from a population of individuals not having the disorder. As will be appreciated in the art, once a standard polypeptide level or mRNA level is known, it can be used repeatedly as a standard for comparison.

[0403] By “biological sample” is intended any biological sample obtained from an individual, cell line, tissue culture, or other source containing polypeptides of the invention (including portions thereof) or mRNA. As indicated, biological samples include body fluids (such as sera, plasma, urine, synovial fluid and spinal fluid) and tissue sources found to express the full length or fragments thereof of a polypeptide or mRNA. Methods for obtaining tissue biopsies and body fluids from mammals are well known in the art. Where the biological sample is to include mRNA, a tissue biopsy is the preferred source.

[0404] Total cellular RNA can be isolated from a biological sample using any suitable technique such as the single-step guanidinium-thiocyanate-phenol-chloroform method described in Chomczynski and Sacchi, Anal. Biochem. 162:156-159 (1987). Levels of mRNA encoding the polypeptides of the invention are then assayed using any appropriate method. These include Northern blot analysis, S1 nuclease mapping, the polymerase chain reaction (PCR), reverse transcription in combination with the polymerase chain reaction (RT-PCR), and reverse transcription in combination with the ligase chain reaction (RT-LCR).

[0405] The present invention also relates to diagnostic assays such as quantitative and diagnostic assays for detecting levels of polypeptides of the invention, in a biological sample (e.g., cells and tissues), including determination of normal and abnormal levels of polypeptides. Thus, for instance, a diagnostic assay in accordance with the invention for detecting over-expression of polypeptides of the invention compared to normal control tissue samples may be used to detect the presence of tumors. Assay techniques that can be used to determine levels of a polypeptide, such as a polypeptide of the present invention in a sample derived from a host are well-known to those of skill in the art. Such assay methods include radioimmunoassays, competitive-binding assays, Western Blot analysis and ELISA assays. Assaying polypeptide levels in a biological sample can occur using any art-known method.

[0406] Assaying polypeptide levels in a biological sample can occur using antibody-based techniques. For example, polypeptide expression in tissues can be studied with classical immunohistological methods (Jalkanen et al., J. Cell. Biol. 101:976-985 (1985); Jalkanen, M., et al., J. Cell . Biol. 105:3087-3096 (1987)). Other antibody-based methods useful for detecting polypeptide gene expression include immunoassays, such as the enzyme linked immunosorbent assay (ELISA) and the radioimmunoassay (RIA). Suitable antibody assay labels are known in the art and include enzyme labels, such as, glucose oxidase, and radioisotopes, such as iodine (¹²⁵I, ¹²¹I), carbon (¹⁴C), sulfur (35S), tritium (³H), indium (¹¹² In), and technetium (^{99m}Tc), and fluorescent labels, such as fluorescein and rhodamine, and biotin.

[0407] The tissue or cell type to be analyzed will generally include those which are known, or suspected, to express the gene of inteest (such as, for example, cancer). The protein isolation methods employed herein may, for example, be such as those described in Harlow and Lane (Harlow, E. and Lane, D., 1988, “Antibodies: A Laboratory Manual”, Cold Spring Harbor Laboratory Press, Cold Spring Harbor, N.Y.), which is incorporated herein by reference in its entirety. The isolated cells can be derived from cell culture or from a patient. The analysis of cells taken from culture may be a necessary step in the assessment of cells that could be used as part of a cell-based gene therapy technique or, alternatively, to test the effect of compounds on the expression of the gene.

[0408] For example, antibodies, or fragments of antibodies, such as those described herein, may be used to quantitatively or qualitatively detect the presence of gene products or conserved variants or peptide fragments thereof. This can be accomplished, for example, by immunofluorescence techniques employing a fluorescently labeled antibody coupled with light microscopic, flow cytometric, or fluorimetric detection.

[0409] In a preferred embodiment, antibodies, or fragments of antibodies directed to any one or all of the predicted epitope domains of the polypeptides of the invention (shown in column 7 of Table 1A) may be used to quantitatively or qualitatively detect the presence of gene products or conserved variants or peptide fragments thereof. This can be accomplished, for example, by immunofluorescence techniques employing a fluorescently labeled antibody coupled with light microscopic, flow cytometric, or fluorimetric detection.

[0410] In an additional preferred embodiment, antibodies, or fragments of antibodies directed to a conformational epitope of a polypeptide of the invention may be used to quantitatively or qualitatively detect the presence of gene products or conserved variants or peptide fragments thereof. This can be accomplished, for example, by immunofluorescence techniques employing a fluorescently labeled antibody coupled with light microscopic, flow cytometric, or fluorimetric detection.

[0411] The antibodies (or fragments thereof), and/or polypeptides of the present invention may, additionally, be employed histologically, as in immunofluorescence, immunoelectron microscopy or non-immunological assays, for in situ detection of gene products or conserved variants or peptide fragments thereof. In situ detection may be accomplished by removing a histological specimen from a patient, and applying thereto a labeled antibody or polypeptide of the present invention. The antibody (or fragment thereof) or polypeptide is preferably applied by overlaying the labeled antibody (or fragment) onto a biological sample. Through the use of such a procedure, it is possible to determine not only the presence of the gene product, or conserved variants or peptide fragments, or polypeptide binding, but also its distribution in the examined tissue. Using the present invention, those of ordinary skill will readily perceive that any of a wide variety of histological methods (such as staining procedures) can be modified in order to achieve such in situ detection.

[0412] Immunoassays and non-immunoassays for gene products or conserved variants or peptide fragments thereof will typically comprise incubating a sample, such as a biological fluid, a tissue extract, freshly harvested cells, or lysates of cells which have been incubated in cell culture, in the presence of a detectably labeled antibody capable of binding gene products or conserved variants or peptide fragments thereof, and detecting the bound antibody by any of a number of techniques well-known in the art.

[0413] The biological sample may be brought in contact with and immobilized onto a solid phase support or carrier such as nitrocellulose, or other solid support which is capable of immobilizing cells, cell particles or soluble proteins. The support may then be washed with suitable buffers followed by treatment with the detectably labeled antibody or detectable polypeptide of the invention. The solid phase support may then be washed with the buffer a second time to remove unbound antibody or polypeptide. Optionally the antibody is subsequently labeled. The amount of bound label on solid support may then be detected by conventional means.

[0414] By “solid phase support or carrier” is intended any support capable of binding an antigen or an antibody. Well-known supports or carriers include glass, polystyrene, polypropylene, polyethylene, dextran, nylon, amylases, natural and modified celluloses, polyacrylamides, gabbros, and magnetite. The nature of the carrier can be either soluble to some extent or insoluble for the purposes of the present invention. The support material may have virtually any possible structural configuration so long as the coupled molecule is capable of binding to an antigen or antibody. Thus, the support configuration may be spherical, as in a bead, or cylindrical, as in the inside surface of a test tube, or the external surface of a rod. Alternatively, the surface may be flat such as a sheet, test strip, etc. Preferred supports include polystyrene beads. Those skilled in the art will know many other suitable carriers for binding antibody or antigen, or will be able to ascertain the same by use of routine experimentation.

[0415] The binding activity of a given lot of antibody or antigen polypeptide may be determined according to well known methods. Those skilled in the art will be able to determine operative and optimal assay conditions for each determination by employing routine experimentation.

[0416] In addition to assaying polypeptide levels or polynucleotide levels in a biological sample obtained from an individual, polypeptide or polynucleotide can also be detected in vivo by imaging. For example, in one embodiment of the invention, polypeptides and/or antibodies of the invention are used to image diseased cells, such as neoplasms. In another embodiment, polynucleotides of the invention (e.g., polynucleotides complementary to all or a portion of an mRNA) and/or antibodies (e.g., antibodies directed to any one or a combination of the epitopes of a polypeptide of the invention, antibodies directed to a conformational epitope of a polypeptide of the invention, or antibodies directed to the full length polypeptide expressed on the cell surface of a mammalian cell) are used to image diseased or neoplastic cells.

[0417] Antibody labels or markers for in vivo imaging of polypeptides of the invention include those detectable by X-radiography, NMR, MRI, CAT-scans or ESR. For X-radiography, suitable labels include radioisotopes such as barium or cesium, which emit detectable radiation but are not overtly harmful to the subject. Suitable markers for NMR and ESR include those with a detectable characteristic spin, such as deuterium, which may be incorporated into the antibody by labeling of nutrients for the relevant hybridoma. Where in vivo imaging is used to detect enhanced levels of polypeptides for diagnosis in humans, it may be preferable to use human antibodies or “humanized” chimeric monoclonal antibodies. Such antibodies can be produced using techniques described herein or otherwise known in the art. For example methods for producing chimeric antibodies are known in the art. See, for review, Morrison, Science 229:1202 (1985); Oi et al., BioTechniques 4:214 (1986); Cabilly et al., U.S. Pat. No. 4,816,567; Taniguchi et al., EP 171496; Morrison et al., EP 173494; Neuberger et al., WO 8601533; Robinson et al., WO 8702671; Boulianne et al., Nature 312:643 (1984); Neuberger et al., Nature 314:268 (1985).

[0418] Additionally, any polypeptides of the invention whose presence can be detected, can be administered. For example, polypeptides of the invention labeled with a radio-opaque or other appropriate compound can be administered and visualized in vivo, as discussed, above for labeled antibodies. Further, such polypeptides can be utilized for in vitro diagnostic procedures.

[0419] A polypeptide-specific antibody or antibody fragment which has been labeled with an appropriate detectable imaging moiety, such as a radioisotope (for example, ¹i, ¹¹²In, ^{99m}Tc), a radio-opaque substance, or a material detectable by nuclear magnetic resonance, is introduced (for example, parenterally, subcutaneously or intraperitoneally) into the mammal to be examined for a disorder. It will be understood in the art that the size of the subject and the imaging system used will determine the quantity of imaging moiety needed to produce diagnostic images. In the case of a radioisotope moiety, for a human subject, the quantity of radioactivity injected will normally range from about 5 to 20 millicuries of ^{99m}Tc. The labeled antibody or antibody fragment will then preferentially accumulate at the location of cells which contain the antigenic protein. In vivo tumor imaging is described in S. W. Burchiel et al., “Immunopharmacokinetics of Radiolabeled Antibodies and Their Fragments” (Chapter 13 in Tumor Imaging: The Radiochemical Detection of Cancer, S. W. Burchiel and B. A. Rhodes, eds., Masson Publishing Inc. (1982)).

[0420] With respect to antibodies, one of the ways in which an antibody of the present invention can be detectably labeled is by linking the same to a reporter enzyme and using the linked product in an enzyme immunoassay (EIA) (Voller, A., “The Enzyme Linked Immunosorbent Assay (ELISA)”, 1978, Diagnostic Horizons 2:1-7, Microbiological Associates Quarterly Publication, Walkersville, Md.); Voller et al., J. Clin. Pathol. 31:507-520 (1978); Butler, J. E., Meth. Enzymol. 73:482-523 (1981); Maggio, E. (ed.), 1980, Enzyme Immunoassay, CRC Press, Boca Raton, Fla.,; Ishikawa, E. et al., (eds.), 1981, Enzyme Immunoassay, Kgaku Shoin, Tokyo). The reporter enzyme which is bound to the antibody will react with an appropriate substrate, preferably a chromogenic substrate, in such a manner as to produce a chemical moiety which can be detected, for example, by spectrophotometric, fluorimetric or by visual means. Reporter enzymes which can be used to detectably label the antibody include, but are not limited to, malate dehydrogenase, staphylococcal nuclease, delta-5-steroid isomerase, yeast alcohol dehydrogenase, alpha-glycerophosphate, dehydrogenase, triose phosphate isomerase, horseradish peroxidase, alkaline phosphatase, asparaginase, glucose oxidase, beta-galactosidase, ribonuclease, urease, catalase, glucose-6-phosphate dehydrogenase, glucoamylase and acetylcholinesterase. Additionally, the detection can be accomplished by colorimetric methods which employ a chromogenic substrate for the reporter enzyme. Detection may also be accomplished by visual comparison of the extent of enzymatic reaction of a substrate in comparison with similarly prepared standards.

[0421] Detection may also be accomplished using any of a variety of other immunoassays. For example, by radioactively labeling the antibodies or antibody fragments, it is possible to detect polypeptides through the use of a radioimmunoassay (RIA) (see, for example, Weintraub, B., Principles of Radoimmunoassays, Seventh Training Course on Radioligand Assay Techniques, The Endocrine Society, March, 1986, which is incorporated by reference herein). The radioactive isotope can be detected by means including, but not limited to, a gamma counter, a scintillation counter, or autoradiography.

[0422] It is also possible to label the antibody with a fluorescent compound. When the fluorescently labeled antibody is exposed to light of the proper wave length, its presence can then be detected due to fluorescence. Among the most commonly used fluorescent labeling compounds are fluorescein isothiocyanate, rhodamine, phycoerythrin, phycocyanin, allophycocyanin, ophthaldehyde and fluorescamine.

[0423] The antibody can also be detectably labeled using fluorescence emitting metals such as ¹⁵²Eu, or others of the lanthanide series. These metals can be attached to the antibody using such metal chelating groups as diethylenetriaminepentacetic acid (DTPA) or ethylenediaminetetraacetic acid (EDTA).

[0424] The antibody also can be detectably labeled by coupling it to a chemiluminescent compound. The presence of the chemiluminescent-tagged antibody is then determined by detecting the presence of luminescence that arises during the course of a chemical reaction. Examples of particularly useful chemiluminescent labeling compounds are luminol, isoluminol, theromatic acridinium ester, imidazole, acridinium salt and oxalate ester.

[0425] Likewise, a bioluminescent compound may be used to label the antibody of the present invention. Bioluminescence is a type of chemiluminescence found in biological systems in, which a catalytic protein increases the efficiency of the chemiluminescent reaction. The presence of a bioluminescent protein is determined by detecting the presence of luminescence. Important bioluminescent compounds for purposes of labeling are luciferin, luciferase and aequorin.

[0426] Methods for Detecting Diseases

[0427] In general, a disease may be detected in a patient based on the presence of one or more proteins of the invention and/or polynucleotides encoding such proteins in a biological sample (for example, blood, sera, urine, and/or tumor biopsies) obtained from the patient. In other words, such proteins may be used as markers to indicate the presence or absence of a disease or disorder, including cancer and/or as described elsewhere herein. In addition, such proteins may be useful for the detection of other diseases and cancers. The binding agents provided herein generally permit detection of the level of antigen that binds to the agent in the biological sample. Polynucleotide primers and probes may be used to detect the level of mRNA encoding polypeptides of the invention, which is also indicative of the presence or absence of a disease or disorder, including cancer. In general, polypeptides of the invention should be present at a level that is at least three fold higher in diseased tissue than in normal tissue.

[0428] There are a variety of assay formats known to those of ordinary skill in the art for using a binding agent to detect polypeptide markers in a sample. See, e.g., Harlow and Lane, supra. In general, the presence or absence of a disease in a patient may be determined by (a) contacting a biological sample obtained from a patient with a binding agent; (b) detecting in the sample a level of polypeptide that binds to the binding agent; and (c) comparing the level of polypeptide with a predetermined cut-off value.

[0429] In a preferred embodiment, the assay involves the use of a binding agent(s) immobilized on a solid support to bind to and remove the polypeptide of the invention from the remainder of the sample. The bound polypeptide may then be detected using a detection reagent that contains a reporter group and specifically binds to the binding agent/polypeptide complex. Such detection reagents may comprise, for example, a binding agent that specifically binds to the polypeptide or an antibody or other agent that specifically binds to the binding agent, such as an anti-immunoglobulin, protein G, protein A or a lectin. Alternatively, a competitive assay may be utilized, in which a polypeptide is labeled with a reporter group and allowed to bind to the immobilized binding agent after incubation of the binding agent with the sample. The extent to which components of the sample inhibit the binding of the labeled polypeptide to the binding agent is indicative of the reactivity of the sample with the immobilized binding agent. Suitable polypeptides for use within such assays include polypeptides of the invention and portions thereof, or antibodies, to which the binding agent binds, as described above.

[0430] The solid support may be any material known to those of skill in the art to which polypeptides of the invention may be attached. For example, the solid support may be a test well in a microtiter plate or a nitrocellulose or other suitable membrane. Alternatively, the support may be a bead or disc, such as glass fiberglass, latex or a plastic material such as polystyrene or polyvinylchloride. The support may also be a magnetic particle or a fiber optic sensor, such as those disclosed, for example, in U.S. Pat. No. 5,359,681. The binding agent may be immobilized on the solid support using a variety of techniques known to those of skill in the art, which are amply described in the patent and scientific literature. In the context of the present invention, the term “immobilization” refers to both noncovalent association, such as adsorption, and covalent attachment (which may be a direct linkage between the agent and functional groups on the support or may be a linkage by way of a cross-linking agent). Immobilization by adsorption to a well in a microtiter plate or to a membrane is preferred. In such cases, adsorption may be achieved by contacting the binding agent, in a suitable buffer, with the solid support for the suitable amount of time. The contact time varies with temperature, but is typically between about 1 hour and about 1 day. In general, contacting a well of plastic microtiter plate (such as polystyrene or polyvinylchloride) with an amount of binding agent ranging from about 10 ng to about 10 ug, and preferably about 100 ng to about 1 ug, is sufficient to immobilize an adequate amount of binding agent.

[0431] Covalent attachment of binding agent to a solid support may generally be achieved by first reacting the support with a bifunctional reagent that will react with both the support and a functional group, such as a hydroxyl or amino group, on the binding agent. For example, the binding agent may be covalently attached to supports having an appropriate polymer coating using benzoquinone or by condensation of an aldehyde group on the support with an amine and an active hydrogen on the binding partner (see, e.g., Pierce Immunotechnology Catalog and Handbook, 1991, at A12-A13).

[0432] Gene Therapy Methods

[0433] Also encompassed by the invention are gene therapy methods for treating or preventing disorders, diseases and conditions. The gene therapy methods relate to the introduction of nucleic acid (DNA, RNA and antisense DNA or RNA) sequences into an animal to achieve expression of the polypeptide of the present invention. This method requires a polynucleotide which codes for a polypeptide of the present invention operatively linked to a promoter and any other genetic elements necessary for the expression of the polypeptide by the target tissue. Such gene therapy and delivery techniques are known in the art, see, for example, WO90/11092, which is herein incorporated by reference.

[0434] Thus, for example, cells from a patient may be engineered with a polynucleotide (DNA or RNA) comprising a promoter operably linked to a polynucleotide of the present invention ex vivo, with the engineered cells then being provided to a patient to be treated with the polypeptide of the present invention. Such methods are well-known in the art. For example, see Belldegrun, A., et al., J. Natl. Cancer Inst. 85: 207-216 (1993); Ferrantini, M. et al., Cancer Research 53: 1107-1112 (1993); Ferrantini, M. et al., J. Immunology 153: 4604-4615 (1994); Kaido, T., et al., Int. J. Cancer 60: 221-229 (1995); Ogura, H., et al., Cancer Research 50: 5102-5106 (1990); Santodonato, L., et al., Human Gene Therapy 7:1-10 (1996); Santodonato, L., et al., Gene Therapy 4:1246-1255 (1997); and Zhang, J.-F. et al., Cancer Gene Therapy 3: 31-38 (1996)), which are herein incorporated by reference. In one embodiment, the cells which are engineered are arterial cells. The arterial cells may be reintroduced into the patient through direct injection to the artery, the tissues surrounding the artery, or through catheter injection.

[0435] As discussed in more detail below, the polynucleotide constructs can be delivered by any method that delivers injectable materials to the cells of an animal, such as, injection into the interstitial space of tissues (heart, muscle, skin, lung, liver, and the like). The polynucleotide constructs may be delivered in a pharmaceutically acceptable liquid or aqueous carrier.

[0436] In one embodiment, the polynucleotide of the present invention is delivered as a naked polynucleotide. The term “naked” polynucleotide, DNA or RNA refers to sequences that are free from any delivery vehicle that acts to assist, promote or facilitate entry into the cell, including viral sequences, viral particles, liposome formulations, lipofectin or precipitating agents and the like. However, the polynucleotide of the present invention can also be delivered in liposome formulations and lipofectin formulations and the like can be prepared by methods well known to those skilled in the art. Such methods are described, for example, in U.S. Pat. Nos. 5,593,972, 5,589,466, and 5,580,859, which are herein incorporated by reference.

[0437] The polynucleotide vector constructs used in the gene therapy method are preferably constructs that will not integrate into the host genome nor will they contain sequences that allow for replication. Appropriate vectors include pWLNEO, pSV2CAT, pOG44, pXT1 and pSG available from Stratagene; pSVK3, pBPV, pMSG and pSVL available from Pharmacia; and pEF1/V5, pcDNA3.1, and pRc/CMV2 available from Invitrogen. Other suitable vectors will be readily apparent to the skilled artisan.

[0438] Any strong promoter known to those skilled in the art can be used for driving the expression of the polynucleotide sequence. Suitable promoters include adenoviral promoters, such as the adenoviral major late promoter; or heterologous promoters, such as the cytomegalovirus (CMV) promoter; the respiratory syncytial virus (RSV) promoter; inducible promoters, such as the MMT promoter, the metallothionein promoter; heat shock promoters; the albumin promoter; the ApoAI promoter; human globin promoters; viral thymidine kinase promoters, such as the Herpes Simplex thymidine kinase promoter; retroviral LTRs; the b-actin promoter; and human growth hormone promoters. The promoter also may be the native promoter for the polynucleotide of the present invention.

[0439] Unlike other gene therapy techniques, one major advantage of introducing naked nucleic acid sequences into target cells is the transitory nature of the polynucleotide synthesis in the cells. Studies have shown that non-replicating DNA sequences can be introduced into cells to provide production of the desired polypeptide for periods of up to six months.

[0440] The polynucleotide construct can be delivered to the interstitial space of tissues within the an animal, including of muscle, skin, brain, lung, liver, spleen, bone marrow, thymus, heart, lymph, blood, bone, cartilage, pancreas, kidney, gall bladder, stomach, intestine, testis, ovary, uterus, rectum, nervous system, eye, gland, and connective tissue. Interstitial space of the tissues comprises the intercellular, fluid, mucopolysaccharide matrix among the reticular fibers of organ tissues, elastic fibers in the walls of vessels or chambers, collagen fibers of fibrous tissues, or that same matrix within connective tissue ensheathing muscle cells or in the lacunae of bone. It is similarly the space occupied by the plasma of the circulation and the lymph fluid of the lymphatic channels. Delivery to the interstitial space of muscle tissue is preferred for the reasons discussed below. They may be conveniently delivered by injection into the tissues comprising these cells. They are preferably delivered to and expressed in persistent, non-dividing cells which are differentiated, although delivery and expression may be achieved in non-differentiated or less completely differentiated cells, such as, for example, stem cells of blood or skin fibroblasts. In vivo muscle cells are particularly competent in their ability to take up and express polynucleotides.

[0441] For the naked nucleic acid sequence injection, an effective dosage amount of DNA or RNA will be in the range of from about 0.05 mg/kg body weight to about 50 mg/kg body weight. Preferably the dosage will be from about 0.005 mg/kg to about 20 mg/kg and more preferably from about 0.05 mg/kg to about 5 mg/kg. Of course, as the artisan of ordinary skill will appreciate, this dosage will vary according to the tissue site of injection. The appropriate and effective dosage of nucleic acid sequence can readily be determined by those of ordinary skill in the art and may depend on the condition being treated and the route of administration.

[0442] The preferred route of administration is by the parenteral route of injection into the interstitial space of tissues. However, other parenteral routes may also be used, such as, inhalation of an aerosol formulation particularly for delivery to lungs or bronchial tissues, throat or mucous membranes of the nose. In addition, naked DNA constructs can be delivered to arteries during angioplasty by the catheter used in the procedure.

[0443] The naked polynucleotides are delivered by any method known in the art, including, but not limited to, direct needle injection at the delivery site, intravenous injection, topical administration, catheter infusion, and so-called “gene guns”. These delivery methods are known in the art.

[0444] The constructs may also be delivered with delivery vehicles such as viral sequences, viral particles, liposome formulations, lipofectin, precipitating agents, etc. Such methods of delivery are known in the art.

[0445] In certain embodiments, the polynucleotide constructs are complexed in a liposome preparation. Liposomal preparations for use in the instant invention include cationic (positively charged), anionic (negatively charged) and neutral preparations. However, cationic liposomes are particularly preferred because a tight charge complex can be formed between the cationic liposome and the polyanionic nucleic acid. Cationic liposomes have been shown to mediate intracellular delivery of plasmid DNA (Felgner et al., Proc. Natl. Acad. Sci. USA (1987) 84:7413-7416, which is herein incorporated by reference); mRNA (Malone et al., Proc. Natl. Acad. Sci. USA (1989) 86:6077-6081, which is herein incorporated by reference); and purified transcription factors (Debs et al., J. Biol. Chem. (1990) 265:10189-10192, which is herein incorporated by reference), in functional form.

[0446] Cationic liposomes are readily available. For example, N[1-2,3-dioleyloxy)propyl]-N,N,N-triethylammonium (DOTMA) liposomes are particularly useful and are available under the trademark Lipofectin, from GIBCO BRL, Grand Island, N.Y. (See, also, Felgner et al., Proc. Natl Acad. Sci. USA (1987) 84:7413-7416, which is herein incorporated by reference). Other commercially available liposomes include transfectace (DDAB/DOPE) and DOTAP/DOPE (Boehringer).

[0447] Other cationic liposomes can be prepared from readily available materials using techniques well known in the art. See, e.g. PCT Publication No. WO 90/11092 (which is herein incorporated by reference) for a description of the synthesis of DOTAP (1,2-bis(oleoyloxy)-3-(trimethylammonio)propane) liposomes. Preparation of DOTMA liposomes is explained in the literature, see, e.g., P. Felgner et al., Proc. Natl. Acad. Sci. USA 84:7413-7417, which is herein incorporated by reference. Similar methods can be used to prepare liposomes from other cationic lipid materials.

[0448] Similarly, anionic and neutral liposomes are readily available, such as from Avanti Polar Lipids (Birmingham, Ala.), or can be easily prepared using readily available materials. Such materials include phosphatidyl, choline, cholesterol, phosphatidyl ethanolamine, dioleoylphosphatidyl choline (DOPC), dioleoylphosphatidyl glycerol (DOPG), dioleoylphoshatidyl ethanolamine (DOPE), among others. These materials can also be mixed with the DOTMA and DOTAP starting materials in appropriate ratios. Methods for making liposomes using these materias are well known in the art.

[0449] For example, commercially dioleoylphosphatidyl choline (DOPC), dioleoylphosphatidyl glycerol (DOPG), and dioleoylphosphatidyl ethanolamine (DOPE) can be used in various combinations to make conventional liposomes, with or without the addition of cholesterol. Thus, for example, DOPG/DOPC vesicles can be prepared by drying 50 mg each of DOPG and DOPC under a stream of nitrogen gas into a sonication vial. The sample is placed under a vacuum pump overnight and is hydrated the following day with deionized water. The sample is then sonicated for 2 hours in a capped vial, using a Heat Systems model 350 sonicator equipped with an inverted cup (bath type) probe at the maximum setting while the bath is circulated at 15EC. Alternatively, negatively charged vesicles can be prepared without sonication to produce multilamellar vesicles or by extrusion through nucleopore membranes to produce unilamellar vesicles of discrete size. Other methods are known and available to those of skill in the art.

[0450] The liposomes can comprise multilamellar vesicles (MLVs), small unilamellar vesicles (SUVs), or large unilamellar vesicles (LUVs), with SUVs being preferred. The various liposome-nucleic acid complexes are prepared using methods well known in the art. See, e.g., Straubinger et al., Methods of Immunology (1983), 101:512-527, which is herein incorporated by reference. For example, MLVs containing nucleic acid can be prepared by depositing a thin film of phospholipid on the walls of a glass tube and subsequently hydrating with a solution of the material to be encapsulated. SUVs are prepared by extended sonication of MLVs to produce a homogeneous population of unilamellar liposomes. The material to be entrapped is added to a suspension of preformed MLVs and then sonicated. When using liposomes containing cationic lipids, the dried lipid film is resuspended in an appropriate solution such as sterile water or an isotonic buffer solution such as 10 mM Tris/NaCl, sonicated, and then the preformed liposomes are mixed directly with the DNA. The liposome and DNA form a very stable complex due to binding of the positively charged liposomes to the cationic DNA. SUVs find use with small nucleic acid fragments. LUVs are prepared by a number of methods, well known in the art. Commonly used methods include Ca²+-EDTA chelation (Papahadjopoulos et al., Biochim. Biophys. Acta (1975) 394:483; Wilson et al., Cell 17:77 (1979)); ether injection (Deamer, D. and Bangham, A., Biochim. Biophys. Acta 443:629 (1976); Ostro et al., Biochem. Biophys. Res. Commun. 76:836 (1977); Fraley et al., Proc. Natl. Acad. Sci. USA 76:3348 (1979)); detergent dialysis (Enoch, H. and Strittmatter, P., Proc. Natl. Acad. Sci. USA 76:145 (1979)); and reverse-phase evaporation (REV) (Fraley et al., J. Biol. Chem. 255:10431 (1980); Szoka, F. and Papahadjopoulos, D., Proc. Natl. Acad. Sci. USA 75:145 (1978); Schaefer-Ridder et al., Science 215:166 (1982)), which are herein incorporated by reference.

[0451] Generally, the ratio of DNA to liposomes will be from about 10:1 to about 1:10. Preferably, the ration will be from about 5:1 to about 1:5. More preferably, the ration will be about 3:1 to about 1:3. Still more preferably, the ratio will be about 1:1.

[0452] U.S. Pat. No. 5,676,954 (which is herein incorporated by reference) reports on the injection of genetic material, complexed with cationic liposomes carriers, into mice. U.S. Pat. Nos. 4,897,355, 4,946,787, 5,049,386, 5,459,127, 5,589,466, 5,693,622, 5,580,859, 5,703,055, and international publication no. WO 94/9469 (which are herein incorporated by reference) provide cationic lipids for use in transfecting DNA into cells and mammals. U.S. Pat. Nos. 5,589,466, 5,693,622, 5,580,859, 5,703,055, and international publication no. WO 94/9469 provide methods for delivering DNA-cationic lipid complexes to mammals.

[0453] In certain embodiments, cells are engineered, ex vivo or in vivo, using a retroviral particle containing RNA which comprises a sequence encoding a polypeptide of the present invention. Retroviruses from which the retroviral plasmid vectors may be derived include, but are not limited to, Moloney Murine Leukemia Virus, spleen necrosis virus, Rous sarcoma Virus, Harvey Sarcoma Virus, avian leukosis virus, gibbon ape leukemia virus, human immunodeficiency virus, Myeloproliferative Sarcoma Virus, and mammary tumor virus.

[0454] The retroviral plasmid vector is employed to transduce packaging cell lines to form producer cell lines. Examples of packaging cells which may be transfected include, but are not limited to, the PE501, PA317, R-2, R-AM, PA12, T19-14X, VT-19-17-H2, RCRE, RCRIP, GP+E-86, GP+envAm12, and DAN cell lines as described in Miller, Human Gene Therapy 1:5-14 (1990), which is incorporated herein by reference in its entirety. The vector may transduce the packaging cells through any means known in the art. Such means include, but are not limited to, electroporation, the use of liposomes, and CaPO₄ precipitation. In one alternative, the retroviral plasmid vector may be encapsulated into a liposome, or coupled to a lipid, and then administered to a host.

[0455] The producer cell line generates infectious retroviral vector particles which include polynucleotide encoding a polypeptide of the present invention. Such retroviral vector particles then may be employed, to transduce eukaryotic cells, either in vitro or in vivo. The transduced eukaryotic cells will express a polypeptide of the present invention.

[0456] In certain other embodiments, cells are engineered, ex vivo or in vivo, with polynucleotide contained in an adenovirus vector. Adenovirus can be manipulated such that it encodes and expresses a polypeptide of the present invention, and at the same time is inactivated in terms of its ability to replicate in a normal lytic viral life cycle. Adenovirus expression is achieved without integration of the viral DNA into the host cell chromosome, thereby alleviating concerns about insertional mutagenesis. Furthermore, adenoviruses have been used as live enteric vaccines for many years with an excellent safety profile (Schwartz et al. Am. Rev. Respir. Dis.109:233-238 (1974)). Finally, adenovirus mediated gene transfer has been demonstrated in a number of instances including transfer of alpha-1-antitrypsin and CFTR to the lungs of cotton rats (Rosenfeld, M. A. et al. (1991) Science 252:431-434; Rosenfeld et al., (1992) Cell 68:143-155). Furthermore, extensive studies to attempt to establish adenovirus as a causative agent in human cancer were uniformly negative (Green, M. et al. (1979) Proc. Natl. Acad. Sci. USA 76:6606).

[0457] Suitable adenoviral vectors useful in the present invention are described, for example, in Kozarsky and Wilson, Curr. Opin. Genet. Devel. 3:499-503 (1993); Rosenfeld et al., Cell 68:143-155 (1992); Engelhardt et al., Human Genet. Ther. 4:759-769 (1993); Yang et al., Nature Genet. 7:362-369 (1994); Wilson et al., Nature 365:691-692 (1993); and U.S. Pat. No. 5,652,224, which are herein incorporated by reference. For example, the adenovirus vector Ad2 is useful and can be grown in human 293 cells. These cells contain the E1 region of adenovirus and constitutively express E1a and E1b, which complement the defective adenoviruses by providing the products of the genes deleted from the vector. In addition to Ad2, other varieties of adenovirus (e.g., Ad3, Ad5, and Ad7) are also useful in the present invention.

[0458] Preferably, the adenoviruses used in the present invention are replication deficient. Replication deficient adenoviruses require the aid of a helper virus and/or packaging cell line to form infectious particles. The resulting virus is capable of infecting cells and can express a polynucleotide of interest which is operably linked to a promoter, but cannot replicate in most cells. Replication deficient adenoviruses may be deleted in one or more of all or a portion of the following genes: E1a, E1b, E3, E4, E2a, or L1 through L5.

[0459] In certain other embodiments, the cells are engineered, ex vivo or in vivo, using an adeno-associated virus (AAV). AAVs are naturally occurring defective viruses that require helper viruses to produce infectious particles (Muzyczka, N., Curr. Topics in Microbiol. Immunol. 158:97 (1992)). It is also one of the few viruses that may integrate its DNA into non-dividing cells. Vectors containing as little as 300 base pairs of AAV can be packaged and can integrate, but space for exogenous DNA is limited to about 4.5 kb. Methods for producing and using such AAVs are known in the art. See, for example, U.S. Pat. Nos. 5,139,941, 5,173,414, 5,354,678, 5,436,146, 5,474,935, 5,478,745, and 5,589,377.

[0460] For example, an appropriate AAV vector for use in the present invention will include all the sequences necessary for DNA replication, encapsidation, and host-cell integration. The polynucleotide construct is inserted into the AAV vector using standard cloning methods, such as those found in Sambrook et al., Molecular Cloning: A Laboratory Manual, Cold Spring Harbor Press (1989). The recombinant AAV vector is then transfected into packaging cells which are infected with a helper virus, using any standard technique, including lipofection, electroporation, calcium phosphate precipitation, etc. Appropriate helper viruses include adenoviruses, cytomegaloviruses, vaccinia viruses, or herpes viruses. Once the packaging cells are transfected and infected, they will produce infectious AAV viral particles which contain the polynucleotide construct. These viral particles are then used to transduce eukaryotic cells, either ex vivo or in vivo. The transduced cells will contain the polynucleotide construct integrated into its genome, and will express a polypeptide of the invention.

[0461] Another method of gene therapy involves operably associating heterologous control regions and endogenous polynucleotide sequences (e.g. encoding a polypeptide of the present invention) via homologous recombination (see, e.g., U.S. Pat. No. 5,641,670, issued Jun. 24, 1997; International Publication No. WO 96/29411, published Sep. 26, 1996; International Publication No. WO 94/12650, published Aug. 4, 1994; Koller et al., Proc. Natl. Acad. Sci. USA 86:8932-8935 (1989); and Zijlstra et al., Nature 342:435-438 (1989), which are herein encorporated by reference. This method involves the activation of a gene which is present in the target cells, but which is not normally expressed in the cells, or is expressed at a lower level than desired.

[0462] Polynucleotide constructs are made, using standard techniques known in the art, which contain the promoter with targeting sequences flanking the promoter. Suitable promoters are described herein. The targeting sequence is sufficiently complementary to an endogenous sequence to permit homologous recombination of the promoter-targeting sequence with the endogenous sequence. The targeting sequence will be sufficiently near the 5′ end of the desired endogenous polynucleotide sequence so the promoter will be operably linked to the endogenous sequence upon homologous recombination.

[0463] The promoter and the targeting sequences can be amplified using PCR. Preferably, the amplified promoter contains distinct restriction enzyme sites on the 5′ and 3′ ends. Preferably, the 3′ end of the first targeting sequence contains the same restriction enzyme site as the 5′ end of the amplified promoter and the 5′ end of the second targeting sequence contains the same restriction site as the 3′ end of the amplified promoter. The amplified promoter and targeting sequences are digested and ligated together.

[0464] The promoter-targeting sequence construct is delivered to the cells, either as naked polynucleotide, or in conjunction with transfection-facilitating agents, such as iposomes, viral sequences, viral particles, whole viruses, lipofection, precipitating agents, etc., described in more detail above. The P promoter-targeting sequence can be delivered by any method, included direct needle injection, intravenous injection, topical administration, catheter infusion, particle accelerators, etc. The methods are described in more detail below.

[0465] The promoter-targeting sequence construct is taken up by cells. Homologous recombination between the construct and the endogenous sequence takes place, such that an endogenous sequence is placed under the control of the promoter. The promoter then drives the expression of the endogenous sequence.

[0466] The polynucleotide encoding a polypeptide of the present invention may contain a secretory signal sequence that facilitates secretion of the protein. Typically, the signal sequence is positioned in the coding region of the polynucleotide to be expressed towards or at the 5′ end of the coding region. The signal sequence may be homologous or heterologous to the polynucleotide of interest and may be homologous or heterologous to the cells to be transfected. Additionally, the signal sequence may be chemically synthesized using methods known in the art.

[0467] Any mode of administration of any of the above-described polynucleotides constructs can be used so long as the mode results in the expression of one or more molecules in an amount sufficient to provide a therapeutic effect. This includes direct needle injection, systemic injection, catheter infusion, biolistic injectors, particle accelerators (i.e., “gene guns”), gelfoam sponge depots, other commercially available depot materials, osmotic pumps (e.g., Alza minipumps), oral or suppositorial solid (tablet or pill) pharmaceutical formulations, and decanting or topical applications during surgery. For example, direct injection of naked calcium phosphate-precipitated plasmid into rat liver and rat spleen or a protein-coated plasmid into the portal vein has resulted in gene expression of the foreign gene in the rat livers (Kaneda et al., Science 243:375 (1989)).

[0468] A preferred method of local administration is by direct injection. Preferably, a recombinant molecule of the present invention complexed with a delivery vehicle is administered by direct injection into or locally within the area of arteries. Administration of a composition locally within the area of arteries refers to injecting the composition centimeters and preferably, millimeters within arteries. 14381 Another method of local administration is to contact a polynucleotide construct of the present invention in or around a surgical wound. For example, a patient can undergo surgery and the polynucleotide construct can be coated on the surface of tissue inside the wound or the construct can be injected into areas of tissue inside the wound.

[0469] Therapeutic compositions useful in systemic administration, include recombinant molecules of the present invention complexed to a targeted delivery vehicle of the present invention. Suitable delivery vehicles for use with systemic administration comprise liposomes comprising ligands for targeting the vehicle to a particular site. In specific embodiments, suitable delivery vehicles for use with systemic administration comprise liposomes comprising polypeptides of the invention for targeting the vehicle to a particular site.

[0470] Preferred methods of systemic administration, include intravenous injection, aerosol, oral and percutaneous (topical) delivery. Intravenous injections can be performed using methods standard in the art. Aerosol delivery can also be performed using methods standard in the art (see, for example, Stribling et al., Proc. Natl. Acad. Sci. USA 189:11277-11281, 1992, which is incorporated herein by reference). Oral delivery can be performed by complexing a polynucleotide construct of the present invention to a carrier capable of withstanding degradation by digestive enzymes in the gut of an animal. Examples of such carriers, include plastic capsules or tablets, such as those known in the art. Topical delivery can be performed by mixing a polynucleotide construct of the present invention with a lipophilic reagent (e.g., DMSO) that is capable of passing into the skin.

[0471] Determining an effective amount of substance to be delivered can depend upon a number of factors including, for example, the chemical structure and biological activity of the substance, the age and weight of the animal, the precise condition requiring treatment and its severity, and the route of administration. The frequency of treatments depends upon a number of factors, such as the amount of polynucleotide constructs administered per dose, as well as the health and history of the subject. The precise amount, number of doses, and timing of doses will be determined by the attending physician or veterinarian.

[0472] Therapeutic compositions of the present invention can be administered to any animal, preferably to mammals and birds. Preferred mammals include humans, dogs, cats, mice, rats, rabbits sheep, cattle, horses and pigs, with humans being particularly preferred.

[0473] Biological Activities

[0474] Polynucleotides or polypeptides, or agonists or antagonists of the present invention, can be used in assays to test for one or more biological activities. If these polynucleotides or polypeptides, or agonists or antagonists of the present invention, do exhibit activity in a particular assay, it is likely that these molecules may be involved in the diseases associated with the biological activity. Thus, the polynucleotides and polypeptides, and agonists or antagonists could be used to treat the associated disease.

[0475] Blood and blood-forming organ associated proteins are believed to be involved in biological activities associated with coagulation, hematopoiesis, angiogenesis, cardiovascular functions, immune functions, metabolism, and endocrine functions. Accordingly, compositions of the invention (including polynucleotides, polypeptides and antibodies of the invention, and fragments and variants thereof) may be used in the diagnosis, detection and/or treatment of diseases and/or disorders associated with aberrant blood-function or formation.

[0476] In preferred embodiments, compositions of the invention (including polynucleotides, polypeptides and antibodies of the invention, and fragments and variants thereof) may be used in the diagnosis, prognosis, prevention, and/or treatment of diseases and/or disorders relating to blood and blood formation (e.g., blood coagulation disorders (e.g., hemophilia); blood clotting disorders (e.g., thromboembolism, and pulmonary embolism); fibrinolysis disorders; complement activation disorders (e.g., complement component deficiencies); hematopoietic disorders (e.g., X-linked agammaglobulinemia, anemia); immune system disorders (e.g., autoimmunity and immunodeficiencies); and/or as described under “Immune Activity”, “Cardiovascular Disorders”, and “Blood Disorders” below) and neoplastic disorders (e.g., cell migration, prohormone activation, extracellular matrix turnover, and/or as described under “Immune Activity” and “Hyperproliferative Disorders” below).

[0477] In another embodiment, compositions of the invention (including polynucleotides, polypeptides and antibodies of the invention, and fragments and variants thereof) may be used to treat and/or prevent unwanted side effects and/or complications of other therapeutic treatments (e.g. kidney dialysis, chemotherapy, radiation therapy, and organ/tissue transplant).

[0478] Additionally, compositions of the invention (including polynucleotides, polypeptides and antibodies of the invention, and fragments and variants thereof) may be used in the diagnosis, prognosis, prevention, and/or treatment of infectious or parasitic diseases and/or of conditions that are associated with infectious or parasitic diseases (e.g., AIDS, viral hepatitis, and/or as described in the section entitled “Infectious Diseases”).

[0479] In another embodiment, a polypeptide of the invention, or polynucleotides, antibodies, agonists, or antagonists corresponding to that polypeptide, may be used to diagnose, prognose, prevent, and/or treat diseases and/or disorders associated with the tissue(s) in which the polypeptide of the invention is expressed, including one, two, three, four, five, or more tissues disclosed in Table 1A, column 8 (Tissue Distribution Library Code).

[0480] Thus, polynucleotides, translation products and antibodies of the invention are useful in the diagnosis, prognosis, prevention, and/or treatment of diseases or disorders associated with activities that include, but are not limited to, blood coagulation, fibrinolysis, complement activation, regulation of the immune system and of immune system cells, inflammation, cell migration and prohormone activation.

[0481] More generally, polynucleotides, translation products and antibodies corresponding to this gene may be useful for the diagnosis, detection and/or treatment of diseases and/or disorders associated with the following systems.

[0482] Blood-related Disorders

[0483] The polynucleotides, polypeptides, antibodies, and/or agonists or antagonists of the present invention may be used to modulate hemostatic (the stopping of bleeding) or thrombolytic (clot dissolving) activity. For example, by increasing hemostatic or thrombolytic activity, polynucleotides or polypeptides, and/or agonists or antagonists of the present invention could be used to treat or prevent blood coagulation diseases, disorders, and/or conditions (e.g., afibrinogenemia, factor deficiencies, hemophilia), blood platelet diseases, disorders, and/or conditions (e.g., thrombocytopenia), or wounds resulting from trauma, surgery, or other causes. Alternatively, polynucleotides, polypeptides, antibodies, and/or agonists or antagonists of the present invention that can decrease hemostatic or thrombolytic activity could be used to inhibit or dissolve clotting. These molecules could be important in the treatment or prevention of heart attacks (infarction), strokes, or scarring.

[0484] In specific embodiments, the polynucleotides, polypeptides, antibodies, and/or agonists or antagonists of the present invention may be used to prevent, diagnose, prognose, and/or treat thrombosis, arterial thrombosis, venous thrombosis, thromboembolism, pulmonary embolism, atherosclerosis, myocardial infarction, transient ischemic attack, unstable angina. In specific embodiments, the polynucleotides, polypeptides, antibodies, and/or agonists or antagonists of the present invention may be used for the prevention of occulsion of saphenous grafts, for reducing the risk of periprocedural thrombosis as might accompany angioplasty procedures, for reducing the risk of stroke in patients with atrial fibrillation including nonrheumatic atrial fibrillation, for reducing the risk of embolism associated with mechanical heart valves and or mitral valves disease. Other uses for the polynucleotides, polypeptides, antibodies, and/or agonists or antagonists of the present invention, include, but are not limited to, the prevention of occlusions in extrcorporeal devices (e.g., intravascular canulas, vascular access shunts in hemodialysis patients, hemodialysis machines, and cardiopulmonary bypass machines).

[0485] In another embodiment, a polypeptide of the invention, or polynucleotides, antibodies, agonists, or antagonists corresponding to that polypeptide, may be used to prevent, diagnose, prognose, and/or treat diseases and disorders of the blood and/or blood forming organs associated with the tissue(s) in which the polypeptide of the invention is expressed, including one, two, three, four, five, or more tissues disclosed in Table 1A, column 8 (Tissue Distribution Library Code).

[0486] The polynucleotides, polypeptides, antibodies, and/or agonists or antagonists of the present invention may be used to modulate hematopoietic activity (the formation of blood cells). For example, the polynucleotides, polypeptides, antibodies, and/or agonists or antagonists of the present invention may be used to increase the quantity of all or subsets of blood cells, such as, for example, erythrocytes, lymphocytes (B or T cells), myeloid cells (e.g., basophils, eosinophils, neutrophils, mast cells, macrophages) and platelets. The ability to decrease the quantity of blood cells or subsets of blood cells may be useful in the prevention, detection, diagnosis and/or treatment of anemias and leukopenias described below. Alternatively, the polynucleotides, polypeptides, antibodies, and/or agonists or antagonists of the present invention may be used to decrease the quantity of all or subsets of blood cells, such as, for example, erythrocytes, lymphocytes (B or T cells), myeloid cells (e.g., basophils, eosinophils, neutrophils, mast cells, macrophages) and platelets. The ability to decrease the quantity of blood cells or subsets of blood cells may be useful in the prevention, detection, diagnosis and/or treatment of leukocytoses, such as, for example eosinophilia.

[0487] The polynucleotides, polypeptides, antibodies, and/or agonists or antagonists of the present invention may be used to prevent, treat, or diagnose blood dyscrasia.

[0488] Anemias are conditions in which the number of red blood cells or amount of hemoglobin (the protein that carries oxygen) in them is below normal. Anemia may be caused by excessive bleeding, decreased red blood cell production, or increased red blood cell destruction (hemolysis). The polynucleotides, polypeptides, antibodies, and/or agonists or antagonists of the present invention may be useful in treating, preventing, and/or diagnosing anemias. Anemias that may be treated prevented or diagnosed by the polynucleotides, polypeptides, antibodies, and/or agonists or antagonists of the present invention include iron deficiency anemia, hypochromic anemia, microcytic anemia, chlorosis, hereditary siderob;astic anemia, idiopathic acquired sideroblastic anemia, red cell aplasia, megaloblastic anemia (e.g., pernicious anemia, (vitamin B12 deficiency) and folic acid deficiency anemia), aplastic anemia, hemolytic anemias (e.g., autoimmune helolytic anemia, microangiopathic hemolytic anemia, and paroxysmal nocturnal hemoglobinuria). The polynucleotides, polypeptides, antibodies, and/or agonists or antagonists of the present invention may be useful in treating, preventing, and/or diagnosing anemias associated with diseases including but not limited to, anemias associated with systemic lupus erythematosus, cancers, lymphomas, chronic renal disease, and enlarged spleens. The polynucleotides, polypeptides, antibodies, and/or agonists or antagonists of the present invention may be useful in treating, preventing, and/or diagnosing anemias arising from drug treatments such as anemias associated with methyldopa, dapsone, and/or sulfadrugs. Additionally, rhe polynucleotides, polypeptides, antibodies, and/or agonists or antagonists of the present invention may be useful in treating, preventing, and/or diagnosing anemias associated with abnormal red blood cell architecture including but not limited to, hereditary spherocytosis, hereditary elliptocytosis, glucose-6-phosphate dehydrogenase deficiency, and sickle cell anemia.

[0489] The polynucleotides, polypeptides, antibodies, and/or agonists or antagonists of the present invention may be useful in treating, preventing, and/or diagnosing hemoglobin abnormalities, (e.g., those associated with sickle cell anemia, hemoglobin C disease, hemoglobin S—C disease, and hemoglobin E disease). Additionally, the polynucleotides, polypeptides, antibodies, and/or agonists or antagonists of the present invention may be useful in diagnosing, prognosing, preventing, and/or treating thalassemias, including, but not limited to major and minor forms of alpha-thalassemia and beta-thalassemia.

[0490] In another embodiment, the polynucleotides, polypeptides, antibodies, and/or agonists or antagonists of the present invention may be useful in diagnosing, prognosing, preventing, and/or treating bleeding disorders including, but not limited to, thrombocytopenia (e.g., idiopathic thrombocytopenic purpura, and thrombotic thrombocytopenic purpura), Von Willebrand's disease, hereditary platelet disorders (e.g., storage pool disease such as Chediak-Higashi and Hermansky-Pudlak syndromes, thromboxane A2 dysfunction, thromboasthenia, and Bernard-Soulier syndrome), hemolytic-uremic syndrome, hemophelias such as hemophelia A or Factor VII deficiency and Christmas disease or Factor IX deficiency, Hereditary Hemorhhagic Telangiectsia, also known as Rendu-Osler-Weber syndrome, allergic purpura (Henoch Schonlein purpura) and disseminated intravascular coagulation.

[0491] The effect of the polynucleotides, polypeptides, antibodies, and/or agonists or antagonists of the present invention on the clotting time of blood may be monitored using any of the clotting tests known in the art including, but not limited to, whole blood partial thromboplastin time (PTT), the activated partial thromboplastin time (aPTT), the activated clotting time (ACT), the recalcified activated clotting time, or the Lee-White Clotting time.

[0492] Several diseases and a variety of drugs can cause platelet dysfunction. Thus, in a specific embodiment, the polynucleotides, polypeptides, antibodies, and/or agonists or antagonists of the present invention may be useful in diagnosing, prognosing, preventing, and/or treating acquired platelet dysfunction such as platelet dysfunction accompanying kidney failure, leukemia, multiple myeloma, cirrhosis of the liver, and systemic lupus erythematosus as well as platelet dysfunction associated with drug treatments, including treatment with aspirin, ticlopidine, nonsteroidal anti-inflammatory drugs (used for arthritis, pain, and sprains), and penicillin in high doses.

[0493] In another embodiment, the polynucleotides, polypeptides, antibodies, and/or agonists or antagonists of the present invention may be useful in diagnosing, prognosing, preventing, and/or treating diseases and disorders characterized by or associated with increased or decreased numbers of white blood cells. Leukopenia occurs when the number of white blood cells decreases below normal. Leukopenias include, but are not limited to, neutropenia and lymphocytopenia. An increase in the number of white blood cells compared to normal is known as leukocytosis. The body generates increased numbers of white blood cells during infection. Thus, leukocytosis may simply be a normal physiological parameter that reflects infection. Alternatively, leukocytosis may be an indicator of injury or other disease such as cancer. Leokocytoses, include but are not limited to, eosinophilia, and accumulations of macrophages. In specific embodiments, the polynucleotides, polypeptides, antibodies, and/or agonists or antagonists of the present invention may be useful in diagnosing, prognosing, preventing, and/or treating leukopenia. In other specific embodiments, the polynucleotides, polypeptides, antibodies, and/or agonists or antagonists of the present invention may be useful in diagnosing, prognosing, preventing, and/or treating leukocytosis.

[0494] Leukopenia may be a generalized decreased in all types of white blood cells, or may be a specific depletion of particular types of white blood cells. Thus, in specific embodiments, the polynucleotides, polypeptides, antibodies, and/or agonists or antagonists of the present invention may be useful in diagnosing, prognosing, preventing, and/or treating decreases in neutrophil numbers, known as neutropenia. Neutropenias that may be diagnosed, prognosed, prevented, and/or treated by the polynucleotides, polypeptides, antibodies, and/or agonists or antagonists of the present invention include, but are not limited to, infantile genetic agranulocytosis, familial neutropenia, cyclic neutropenia, neutropenias resulting from or associated with dietary deficiencies (e.g., vitamin B 12 deficiency or folic acid deficiency), neutropenias resulting from or associated with drug treatments (e.g., antibiotic regimens such as penicillin treatment, sulfonamide treatment, anticoagulant treatment, anticonvulsant drugs, anti-thyroid drugs, and cancer chemotherapy), and neutropenias resulting from increased neutrophil destruction that may occur in association with some bacterial or viral infections, allergic disorders, autoimmune diseases, conditions in which an individual has an enlarged spleen (e.g., Felty syndrome, malaria and sarcoidosis), and some drug treatment regimens.

[0495] The polynucleotides, polypeptides, antibodies, and/or agonists or antagonists of the present invention may be useful in diagnosing, prognosing, preventing, and/or treating lymphocytopenias (decreased numbers of B and/or T lymphocytes), including, but not limited lymphocytopenias resulting from or associated with stress, drug treatments (e.g., drug treatment with corticosteroids, cancer chemotherapies, and/or radiation therapies), AIDS infection and/or other diseases such as, for example, cancer, rheumatoid arthritis, systemic lupus erythematosus, chronic infections, some viral infections and/or hereditary disorders (e.g., DiGeorge syndrome, Wiskott-Aldrich Syndome, severe combined immunodeficiency, ataxia telangiectsia).

[0496] The polynucleotides, polypeptides, antibodies, and/or agonists or antagonists of the present invention may be useful in diagnosing, prognosing, preventing, and/or treating diseases and disorders associated with macrophage numbers and/or macrophage function including, but not limited to, Gaucher's disease, Niemann-Pick disease, Letterer-Siwe disease and Hand-Schuller-Christian disease.

[0497] In another embodiment, the polynucleotides, polypeptides, antibodies, and/or agonists or antagonists of the present invention may be useful in diagnosing, prognosing, preventing, and/or treating diseases and disorders associated with eosinophil numbers and/or eosinophil function including, but not limited to, idiopathic hypereosinophilic syndrome, eosinophilia-myalgia syndrome, and Hand-Schuller-Christian disease.

[0498] In yet another embodiment, the polynucleotides, polypeptides, antibodies, and/or agonists or antagonists of the present invention may be useful in diagnosing, prognosing, preventing, and/or treating leukemias and lymphomas including, but not limited to, acute lymphocytic (lymphpblastic) leukemia (ALL), acute myeloid (myelocytic, myelogenous, myeloblastic, or myelomonocytic) leukemia, chronic lymphocytic leukemia (e.g., B cell leukemias, T cell leukemias, Sezary syndrome, and Hairy cell leukenia), chronic myelocytic (myeloid, myelogenous, or granulocytic) leukemia, Hodgkin's lymphoma, non-hodgkin's lymphoma, Burkitt's lymphoma, and mycosis fungoides.

[0499] In other embodiments, the polynucleotides, polypeptides, antibodies, and/or agonists or antagonists of the present invention may be useful in diagnosing, prognosing, preventing, and/or treating diseases and disorders of plasma cells including, but not limited to, plasma cell dyscrasias, monoclonal gammaopathies, monoclonal gammopathies of undetermined significance, multiple myeloma, macroglobulinemia, Waldenstrom's macroglobulinemia, cryoglobulinemia, and Raynaud's phenomenon.

[0500] In other embodiments, the polynucleotides, polypeptides, antibodies, and/or agonists or antagonists of the present invention may be useful in treating, preventing, and/or diagnosing myeloproliferative disorders, including but not limited to, polycythemia vera, relative polycythemia, secondary polycythemia, myelofibrosis, acute myelofibrosis, agnogenic myelod metaplasia, thrombocythemia, (including both primary and seconday thrombocythemia) and chronic myelocytic leukemia.

[0501] In other embodiments, the polynucleotides, polypeptides, antibodies, and/or agonists or antagonists of the present invention may be useful as a treatment prior to surgery, to increase blood cell production.

[0502] In other embodiments, the polynucleotides, polypeptides, antibodies, and/or agonists or antagonists of the present invention may be useful as an agent to enhance the migration, phagocytosis, superoxide production, antibody dependent cellular cytotoxicity of neutrophils, eosionophils and macrophages.

[0503] In other embodiments, the polynucleotides, polypeptides, antibodies, and/or agonists or antagonists of the present invention may be useful as an agent to increase the number of stem cells in circulation prior to stem cells pheresis. In another specific embodiment, the polynucleotides, polypeptides, antibodies, and/or agonists or antagonists of the present invention may be useful as an agent to increase the number of stem cells in circulation prior to platelet pheresis.

[0504] In other embodiments, the polynucleotides, polypeptides, antibodies, and/or agonists or antagonists of the present invention may be useful as an agent to increase cytokine production.

[0505] In other embodiments, the polynucleotides, polypeptides, antibodies, and/or agonists or antagonists of the present invention may be useful in preventing, diagnosing, and/or treating primary hematopoietic disorders.

[0506] Immune Activity

[0507] Polynucleotides, polypeptides, antibodies, and/or agonists or antagonists of the present invention may be useful in treating, preventing, diagnosing and/or prognosing diseases, disorders, and/or conditions of the immune system, by, for example, activating or inhibiting the proliferation, differentiation, or mobilization (chemotaxis) of immune cells. Immune cells develop through a process called hematopoiesis, producing myeloid (platelets, red blood cells, neutrophils, and macrophages) and lymphoid (B and T lymphocytes) cells from pluripotent stem cells. The etiology of these immune diseases, disorders, and/or conditions may be genetic, somatic, such as cancer and some autoimmune diseases, acquired (e.g., by chemotherapy or toxins), or infectious. Moreover, polynucleotides, polypeptides, antibodies, and/or agonists or antagonists of the present invention can be used as a marker or detector of a particular immune system disease or disorder.

[0508] In another embodiment, a polypeptide of the invention, or polynucleotides, antibodies, agonists, or antagonists corresponding to that polypeptide, may be used to treat diseases and disorders of the immune system and/or to inhibit or enhance an immune response generated by cells associated with the tissue(s) in which the polypeptide of the invention is expressed, including one, two, three, four, five, or more tissues disclosed in Table 1A, column 8 (Tissue Distribution Library Code).

[0509] Polynucleotides, polypeptides, antibodies, and/or agonists or antagonists of the present invention may be useful in treating, preventing, diagnosing, and/or prognosing immunodeficiencies, including both congenital and acquired immunodeficiencies. Examples of B cell immunodeficiencies in which immunoglobulin levels B cell function and/or B cell numbers are decreased include: X-linked agammaglobulinemia (Bruton's disease), X-linked infantile agammaglobulinemia, X-linked immunodeficiency with hyper IgM, non X-linked immunodeficiency with hyper IgM, X-linked lymphoproliferative syndrome (XLP), agammaglobulinemia including congenital and acquired agammaglobulinemia, adult onset agammaglobulinemia, late-onset agammaglobulinemia, dysgammaglobulinemia, hypogammaglobulinemia, unspecified hypogammaglobulinemia, recessive agammaglobulinemia (Swiss type), Selective IgM deficiency, selective IgA deficiency, selective IgG subclass deficiencies, IgG subclass deficiency (with or without IgA deficiency), Ig deficiency with increased IgM, IgG and IgA deficiency with increased IgM, antibody deficiency with normal or elevated Igs, Ig heavy chain deletions, kappa chain deficiency, B cell lymphoproliferative disorder (BLPD), common variable immunodeficiency (CVID), common variable immunodeficiency (CVI) (acquired), and transient hypogammaglobulinemia of infancy.

[0510] In specific embodiments, ataxia-telangiectasia or conditions associated with ataxia-telangiectasia are treated, prevented, diagnosed, and/or prognosing using the polypeptides or polynucleotides of the invention, and/or agonists or antagonists thereof.

[0511] Examples of congenital immunodeficiencies in which T cell and/or B cell function and/or number is decreased include, but are not limited to: DiGeorge anomaly, severe combined immunodeficiencies (SCID) (including, but not limited to, X-linked SCID, autosomal recessive SCID, adenosine deaminase deficiency, purine nucleoside phosphorylase (PNP) deficiency, Class II MHC deficiency (Bare lymphocyte syndrome), Wiskott-Aldrich syndrome, and ataxia telangiectasia), thymic hypoplasia, third and fourth pharyngeal pouch syndrome, 22q11.2 deletion, chronic mucocutaneous candidiasis, natural killer cell deficiency (NK), idiopathic CD4+ T-lymphocytopenia, immunodeficiency with predominant T cell defect (unspecified), and unspecified immunodeficiency of cell mediated immunity.

[0512] In specific embodiments, DiGeorge anomaly or conditions associated with DiGeorge anomaly are treated, prevented, diagnosed, and/or prognosed using polypeptides or polynucleotides of the invention, or antagonists or agonists thereof.

[0513] Other immunodeficiencies that may be treated, prevented, diagnosed, and/or prognosed using polypeptides or polynucleotides of the invention, and/or agonists or antagonists thereof, include, but are not limited to, chronic granulomatous disease, Chediak-Higashi syndrome, myeloperoxidase deficiency, leukocyte glucose-6-phosphate dehydrogenase deficiency, X-linked lymphoproliferative syndrome (XLP), leukocyte adhesion deficiency, complement component deficiencies (including C1, C2, C3, C4, C5, C6, C7, C8 and/or C9 deficiencies), reticular dysgenesis, thymic alymphoplasia-aplasia, immunodeficiency with thymoma, severe congenital leukopenia, dysplasia with immunodeficiency, neonatal neutropenia, short limbed dwarfism, and Nezelof syndrome-combined immunodeficiency with Igs.

[0514] In a preferred embodiment, the immunodeficiencies and/or conditions associated with the immunodeficiencies recited above are treated, prevented, diagnosed and/or prognosed using polynucleotides, polypeptides, antibodies, and/or agonists or antagonists of the present invention.

[0515] In a preferred embodiment polynucleotides, polypeptides, antibodies, and/or agonists or antagonists of the present invention could be used as an agent to boost immunoresponsiveness among immunodeficient individuals. In specific embodiments, polynucleotides, polypeptides, antibodies, and/or agonists or antagonists of the present invention could be used as an agent to boost immunoresponsiveness among B cell and/or T cell immunodeficient individuals.

[0516] The polynucleotides, polypeptides, antibodies, and/or agonists or antagonists of the present invention may be useffil in treating, preventing, diagnosing and/or prognosing autoimmune disorders. Many autoimmune disorders result from inappropriate recognition of self as foreign material by immune cells. This inappropriate recognition results in an immune response leading to the destruction of the host tissue. Therefore, the administration of polynucleotides and polypeptides of the invention that can inhibit an immune response, particularly the proliferation, differentiation, or chemotaxis of T-cells, may be an effective therapy in preventing autoimmune disorders.

[0517] Autoimmune diseases or disorders that may be treated, prevented, diagnosed and/or prognosed by polynucleotides, polypeptides, antibodies, and/or agonists or antagonists of the present invention include, but are not limited to, one or more of the following: systemic lupus erythematosus, rheumatoid arthritis, ankylosing spondylitis, multiple sclerosis, autoimmune thyroiditis, Hashimoto's thyroiditis, autoimmune hemolytic anemia, hemolytic anemia, thrombocytopenia, autoimmune thrombocytopenia purpura, autoimmune neonatal thrombocytopenia, idiopathic thrombocytopenia purpura, purpura (e.g., Henloch-Scoenlein purpura), autoimmunocytopenia, Goodpasture's syndrome, Pemphigus vulgaris, myasthenia gravis, Grave's disease (hyperthyroidism), and insulin-resistant diabetes mellitus.

[0518] Additional disorders that are likely to have an autoimmune component that may be treated, prevented, and/or diagnosed with the compositions of the invention include, but are not limited to, type II collagen-induced arthritis, antiphospholipid syndrome, dermatitis, allergic encephalomyelitis, myocarditis, relapsing polychondritis, rheumatic heart disease, neuritis, uveitis ophthalmia, polyendocrinopathies, Reiter's Disease, Stiff-Man Syndrome, autoimmune pulmonary inflammation, autism, Guillain-Barre Syndrome, insulin dependent diabetes mellitus, and autoimmune inflammatory eye disorders.

[0519] Additional disorders that are likely to have an autoimmune component that may be treated, prevented, diagnosed and/or prognosed with the compositions of the invention include, but are not limited to, scleroderma with anti-collagen antibodies (often characterized, e.g., by nucleolar and other nuclear antibodies), mixed connective tissue disease (often characterized, e.g., by antibodies to extractable nuclear antigens (e.g., ribonucleoprotein)), polymyositis (often characterized, e.g., by nonhistone ANA), pernicious anemia (often characterized, e.g., by antiparietal cell, microsomes, and intrinsic factor antibodies), idiopathic Addison's disease (often characterized, e.g., by humoral and cell-mediated adrenal cytotoxicity, infertility (often characterized, e.g., by antispermatozoal antibodies), glomerulonephritis (often characterized, e.g., by glomerular basement membrane antibodies or immune complexes), bullous pemphigoid (often characterized, e.g., by IgG and complement in basement membrane), Sjogren's syndrome (often characterized, e.g., by multiple tissue antibodies, and/or a specific nonhistone ANA (SS-B)), diabetes mellitus (often characterized, e.g., by cell-mediated and humoral islet cell antibodies), and adrenergic drug resistance (including adrenergic drug resistance with asthma or cystic fibrosis) (often characterized, e.g., by beta-adrenergic receptor antibodies).

[0520] Additional disorders that may have an autoimmune component that may be treated, prevented, diagnosed and/or prognosed with the compositions of the invention include, but are not limited to, chronic active hepatitis (often characterized, e.g., by smooth muscle antibodies), primary biliary cirrhosis (often characterized, e.g., by mitochondria antibodies), other endocrine gland failure (often characterized, e.g., by specific tissue antibodies in some cases), vitiligo (often characterized, e.g., by melanocyte antibodies), vasculitis (often characterized, e.g., by Ig and complement in vessel walls and/or low serum complement), post-MI (often characterized, e.g., by myocardial antibodies), cardiotomy syndrome (often characterized, e.g., by myocardial antibodies), urticaria (often characterized, e.g., by IgG and IgM antibodies to IgE), atopic dermatitis (often characterized, e.g., by IgG and IgM antibodies to IgE), asthma (often characterized, e.g., by IgG and IgM antibodies to IgE), and many other inflammatory, granulomatous, degenerative, and atrophic disorders.

[0521] In a preferred embodiment, the autoimmune diseases and disorders and/or conditions associated with the diseases and disorders recited above are treated, prevented, diagnosed and/or prognosed using for example, antagonists or agonists, polypeptides or polynucleotides, or antibodies of the present invention. In a specific preferred embodiment, rheumatoid arthritis is treated, prevented, and/or diagnosed using polynucleotides, polypeptides, antibodies, and/or agonists or antagonists of the present invention.

[0522] In another specific preferred embodiment, systemic lupus erythematosus is treated, prevented, and/or diagnosed using polynucleotides, polypeptides, antibodies, and/or agonists or antagonists of the present invention. In another specific preferred embodiment, idiopathic thrombocytopenia purpura is treated, prevented, and/or diagnosed using polynucleotides, polypeptides, antibodies, and/or agonists or antagonists of the present invention.

[0523] In another specific preferred embodiment IgA nephropathy is treated, prevented, and/or diagnosed using polynucleotides, polypeptides, antibodies, and/or agonists or antagonists of the present invention.

[0524] In a preferred embodiment, the autoimmune diseases and disorders and/or conditions associated with the diseases and disorders recited above are treated, prevented, diagnosed and/or prognosed using polynucleotides, polypeptides, antibodies, and/or agonists or antagonists of the present invention.

[0525] In preferred embodiments, polypeptides, antibodies, polynucleotides and/or agonists or antagonists of the present invention are used as a immunosuppressive agent(s).

[0526] Polynucleotides, polypeptides, antibodies, and/or agonists or antagonists of the present invention may be useful in treating, preventing, prognosing, and/or diagnosing diseases, disorders, and/or conditions of hematopoietic cells. Polynucleotides, polypeptides, antibodies, and/or agonists or antagonists of the present invention could be used to increase differentiation and proliferation of hematopoietic cells, including the pluripotent stem cells, in an effort to treat or prevent those diseases, disorders, and/or conditions associated with a decrease in certain (or many) types hematopoietic cells, including but not limited to, leukopenia, neutropenia, anemia, and thrombocytopenia. Alternatively, Polynucleotides, polypeptides, antibodies, and/or agonists or antagonists of the present invention could be used to increase differentiation and proliferation of hematopoietic cells, including the pluripotent stem cells, in an effort to treat or prevent those diseases, disorders, and/or conditions associated with an increase in certain (or many) types of hematopoietic cells, including but not limited to, histiocytosis.

[0527] Allergic reactions and conditions, such as asthma (particularly allergic asthma) or other respiratory problems, may also be treated, prevented, diagnosed and/or prognosed using polypeptides, antibodies, or polynucleotides of the invention, and/or agonists or antagonists thereof. Moreover, these molecules can be used to treat, prevent, prognose, and/or diagnose anaphylaxis, hypersensitivity to an antigenic molecule, or blood group incompatibility.

[0528] Additionally, polypeptides or polynucleotides of the invention, and/or agonists or antagonists thereof, may be used to treat, prevent, diagnose and/or prognose IgE-mediated allergic reactions. Such allergic reactions include, but are not limited to, asthma, rhinitis, and eczema. In specific embodiments, polynucleotides, polypeptides, antibodies, and/or agonists or antagonists of the present invention may be used to modulate IgE concentrations in vitro or in vivo.

[0529] Moreover, polynucleotides, polypeptides, antibodies, and/or agonists or antagonists of the present invention have uses in the diagnosis, prognosis, prevention, and/or treatment of inflammatory conditions. For example, since polypeptides, antibodies, or polynucleotides of the invention, and/or agonists or antagonists of the invention may inhibit the activation, proliferation and/or differentiation of cells involved in an inflammatory response, these molecules can be used to prevent and/or treat chronic and acute inflammatory conditions. Such inflammatory conditions include, but are not limited to, for example, inflammation associated with infection (e.g., septic shock, sepsis, or systemic inflammatory response syndrome), ischemia-reperfusion injury, endotoxin lethality, complement-mediated hyperacute rejection, nephritis, cytokine or chemokine induced lung injury, inflammatory bowel disease, Crohn's disease, over production of cytokines (e.g., TNF or IL-1.), respiratory disorders (e.g., asthma and allergy); gastrointestinal disorders (e.g., inflammatory bowel disease); cancers (e.g., gastric, ovarian, lung, bladder, liver, and breast); CNS disorders (e.g., multiple sclerosis; ischemic brain injury and/or stroke, traumatic brain injury, neurodegenerative disorders (e.g., Parkinson's disease and Alzheimer's disease); AIDS-related dementia; and prion disease); cardiovascular disorders (e.g., atherosclerosis, myocarditis, cardiovascular disease, and cardiopulmonary bypass complications); as well as many additional diseases, conditions, and disorders that are characterized by inflammation (e.g., hepatitis, rheumatoid arthritis, gout, trauma, pancreatitis, sarcoidosis, dermatitis, renal ischemia-reperfusion injury, Grave's disease, systemic lupus erythematosus, diabetes mellitus, and allogenic transplant rejection).

[0530] Because inflammation is a fundamental defense mechanism, inflammatory disorders can effect virtually any tissue of the body. Accordingly, polynucleotides, polypeptides, and antibodies of the invention, as well as agonists or antagonists thereof, have uses in the treatment of tissue-specific inflammatory disorders, including, but not limited to, adrenalitis, alveolitis, angiocholecystitis, appendicitis, balanitis, blepharitis, bronchitis, bursitis, carditis, cellulitis, cervicitis, cholecystitis, chorditis, cochlitis, colitis, conjunctivitis, cystitis, dermatitis, diverticulitis, encephalitis, endocarditis, esophagitis, eustachitis, fibrositis, folliculitis, gastritis, gastroenteritis, gingivitis, glossitis, hepatosplenitis, keratitis, labyrinthitis, laryngitis, lymphangitis, mastitis, media otitis, meningitis, metritis, mucitis, myocarditis, myosititis, myringitis, nephritis, neuritis, orchitis, osteochondritis, otitis, pericarditis, peritendonitis, peritonitis, pharyngitis, phlebitis, poliomyelitis, prostatitis, pulpitis, retinitis, rhinitis, salpingitis, scleritis, sclerochoroiditis, scrotitis, sinusitis, spondylitis, steatitis, stomatitis, synovitis, syringitis, tendonitis, tonsillitis, urethritis, and vaginitis.

[0531] In specific embodiments, polypeptides, antibodies, or polynucleotides of the invention, and/or agonists or antagonists thereof, are useful to diagnose, prognose, prevent, and/or treat organ transplant rejections and graft-versus-host disease. Organ rejection occurs by host immune cell destruction of the transplanted tissue through an immune response. Similarly, an immune response is also involved in GVHD, but, in this case, the foreign transplanted immune cells destroy the host tissues. Polypeptides, antibodies, or polynucleotides of the invention, and/or agonists or antagonists thereof, that inhibit an immune response, particularly the activation, proliferation, differentiation, or chemotaxis of T-cells, may be an effective therapy in preventing organ rejection or GVHD. In specific embodiments, polypeptides, antibodies, or polynucleotides of the invention, and/or agonists or antagonists thereof, that inhibit an immune response, particularly the activation, proliferation, differentiation, or chemotaxis of T-cells, may be an effective therapy in preventing experimental allergic and hyperacute xenograft rejection.

[0532] In other embodiments, polypeptides, antibodies, or polynucleotides of the invention, and/or agonists or antagonists thereof, are useful to diagnose, prognose, prevent, and/or treat immune complex diseases, including, but not limited to, serum sickness, post streptococcal glomerulonephritis, polyarteritis nodosa, and immune complex-induced vasculitis.

[0533] Polypeptides, antibodies, polynucleotides and/or agonists or antagonists of the invention can be used to treat, detect, and/or prevent infectious agents. For example, by increasing the immune response, particularly increasing the proliferation activation and/or differentiation of B and/or T cells, infectious diseases may be treated, detected, and/or prevented. The immune response may be increased by either enhancing an existing immune response, or by initiating a new immune response. Alternatively, polynucleotides, polypeptides, antibodies, and/or agonists or antagonists of the present invention may also directly inhibit the infectious agent (refer to section of application listing infectious agents, etc), without necessarily eliciting an immune response.

[0534] In another embodiment, polypeptides, antibodies, polynucleotides and/or agonists or antagonists of the present invention are used as a vaccine adjuvant that enhances immune responsiveness to an antigen. In a specific embodiment, polypeptides, antibodies, polynucleotides and/or agonists or antagonists of the present invention are used as an adjuvant to enhance tumor-specific immune responses.

[0535] In another specific embodiment, polypeptides, antibodies, polynucleotides and/or agonists or antagonists of the present invention are used as an adjuvant to enhance anti-viral immune responses. Anti-viral immune responses that may be enhanced using the compositions of the invention as an adjuvant, include virus and virus associated diseases or symptoms described herein or otherwise known in the art. In specific embodiments, the compositions of the invention are used as an adjuvant to enhance an immune response to a virus, disease, or symptom selected from the group consisting of: AIDS, meningitis, Dengue, EBV, and hepatitis (e.g., hepatitis B). In another specific embodiment, the compositions of the invention are used as an adjuvant to enhance an immune response to a virus, disease, or symptom selected from the group consisting of: HIV/AIDS, respiratory syncytial virus, Dengue, rotavirus, Japanese B encephalitis, influenza A and B, parainfluenza, measles, cytomegalovirus, rabies, Junin, Chikungunya, Rift Valley Fever, herpes simplex, and yellow fever.

[0536] In another specific embodiment, polypeptides, antibodies, polynucleotides and/or agonists or antagonists of the present invention are used as an adjuvant to enhance anti-bacterial or anti-fungal immune responses. Anti-bacterial or anti-fungal immune responses that may be enhanced using the compositions of the invention as an adjuvant, include bacteria or fungus and bacteria or fungus associated diseases or symptoms described herein or otherwise known in the art. In specific embodiments, the compositions of the invention are used as an adjuvant to enhance an immune response to a bacteria or fungus, disease, or symptom selected from the group consisting of: tetanus, Diphtheria, botulism, and meningitis type B.

[0537] In another specific embodiment, the compositions of the invention are used as an adjuvant to enhance an immune response to a bacteria or fungus, disease, or symptom selected from the group consisting of: Vibrio cholerae, Mycobacterium leprae, Salmonella typhi, Salmonella paratyphi, Meisseria meningitidis, Streptococcus pneumoniae, Group B streptococcus, Shigella spp., Enterotoxigenic Escherichia coli, Enterohemorrhagic E. coli, and Borrelia burgdorferi.

[0538] In another specific embodiment, polypeptides, antibodies, polynucleotides and/or agonists or antagonists of the present invention are used as an adjuvant to enhance anti-parasitic immune responses. Anti-parasitic immune responses that may be enhanced using the compositions of the invention as an adjuvant, include parasite and parasite associated diseases or symptoms described herein or otherwise known in the art. In specific embodiments, the compositions of the invention are used as an adjuvant to enhance an immune response to a parasite. In another specific embodiment, the compositions of the invention are used as an adjuvant to enhance an immune response to Plasmodium (malaria) or Leishmania.

[0539] In another specific embodiment, polypeptides, antibodies, polynucleotides and/or agonists or antagonists of the present invention may also be employed to treat infectious diseases including silicosis, sarcoidosis, and idiopathic pulmonary fibrosis; for example, by preventing the recruitment and activation of mononuclear phagocytes.

[0540] In another specific embodiment, polypeptides, antibodies, polynucleotides and/or agonists or antagonists of the present invention are used as an antigen for the generation of antibodies to inhibit or enhance immune mediated responses against polypeptides of the invention.

[0541] In one embodiment, polypeptides, antibodies, polynucleotides and/or agonists or antagonists of the present invention are administered to an animal (e.g., mouse, rat, rabbit, hamster, guinea pig, pigs, micro-pig, chicken, camel, goat, horse, cow, sheep, dog, cat, non-human primate, and human, most preferably human) to boost the immune system to produce increased quantities of one or more antibodies (e.g., IgG, IgA, IgM, and IgE), to induce higher affinity antibody production and immunoglobulin class switching (e.g., IgG, IgA, IgM, and IgE), and/or to increase an immune response.

[0542] In another specific embodiment, polypeptides, antibodies, polynucleotides and/or agonists or antagonists of the present invention are used as a stimulator of B cell responsiveness to pathogens.

[0543] In another specific embodiment, polypeptides, antibodies, polynucleotides and/or agonists or antagonists of the present invention are used as an activator of T cells.

[0544] In another specific embodiment, polypeptides, antibodies, polynucleotides and/or agonists or antagonists of the present invention are used as an agent that elevates the immune status of an individual prior to their receipt of immunosuppressive therapies.

[0545] In another specific embodiment, polypeptides, antibodies, polynucleotides and/or agonists or antagonists of the present invention are used as an agent to induce higher affinity antibodies.

[0546] In another specific embodiment, polypeptides, antibodies, polynucleotides and/or agonists or antagonists of the present invention are used as an agent to increase serum immunoglobulin concentrations.

[0547] In another specific embodiment, polypeptides, antibodies, polynucleotides and/or agonists or antagonists of the present invention are used as an agent to accelerate recovery of immunocompromised individuals.

[0548] In another specific embodiment, polypeptides, antibodies, polynucleotides and/or agonists or antagonists of the present invention are used as an agent to boost immunoresponsiveness among aged populations and/or neonates.

[0549] In another specific embodiment, polypeptides, antibodies, polynucleotides and/or agonists or antagonists of the present invention are used as an immune system enhancer prior to, during, or after bone marrow transplant and/or other transplants (e.g., allogeneic or xenogeneic organ transplantation). With respect to transplantation, compositions of the invention may be administered prior to, concomitant with, and/or after transplantation. In a specific embodiment, compositions of the invention are administered after transplantation, prior to the beginning of recovery of T-cell populations. In another specific embodiment, compositions of the invention are first administered after transplantation after the beginning of recovery of T cell populations, but prior to full recovery of B cell populations.

[0550] In another specific embodiment, polypeptides, antibodies, polynucleotides and/or agonists or antagonists of the present invention are used as an agent to boost immunoresponsiveness among individuals having an acquired loss of B cell function. Conditions resulting in an acquired loss of B cell function that may be ameliorated or treated by administering the polypeptides, antibodies, polynucleotides and/or agonists or antagonists thereof, include, but are not limited to, HIV Infection, AIDS, bone marrow transplant, and B cell chronic lymphocytic leukemia (CLL).

[0551] In another specific embodiment, polypeptides, antibodies, polynucleotides and/or agonists or antagonists of the present invention are used as an agent to boost immunoresponsiveness among individuals having a temporary immune deficiency. Conditions resulting in a temporary immune deficiency that may be ameliorated or treated by administering the polypeptides, antibodies, polynucleotides and/or agonists or antagonists thereof, include, but are not limited to, recovery from viral infections (e.g., influenza), conditions associated with malnutrition, recovery from infectious mononucleosis, or conditions associated with stress, recovery from measles, recovery from blood transfusion, and recovery from surgery.

[0552] In another specific embodiment, polypeptides, antibodies, polynucleotides and/or agonists or antagonists of the present invention are used as a regulator of antigen presentation by monocytes, dendritic cells, and/or B-cells. In one embodiment, polynucleotides, polypeptides, antibodies, and/or agonists or antagonists of the present invention enhance antigen presentation or antagonizes antigen presentation in vitro or in vivo. Moreover, in related embodiments, said enhancement or antagonism of antigen presentation may be useful as an anti-tumor treatment or to modulate the immune system.

[0553] In another specific embodiment, polypeptides, antibodies, polynucleotides and/or agonists or antagonists of the present invention are used as an agent to direct an individual's immune system towards development of a humoral response (i.e. TH2) as opposed to a TH1 cellular response.

[0554] In another specific embodiment, polypeptides, antibodies, polynucleotides and/or agonists or antagonists of the present invention are used as a means to induce tumor proliferation and thus make it more susceptible to anti-neoplastic agents. For example, multiple myeloma is a slowly dividing disease and is thus refractory to virtually all anti-neoplastic regimens. If these cells were forced to proliferate more rapidly their susceptibility profile would likely change.

[0555] In another specific embodiment, polypeptides, antibodies, polynucleotides and/or agonists or antagonists of the present invention are used as a stimulator of B cell production in pathologies such as AIDS, chronic lymphocyte disorder and/or Common Variable Immunodificiency.

[0556] In another specific embodiment, polypeptides, antibodies, polynucleotides and/or agonists or antagonists of the present invention are used as a therapy for generation and/or regeneration of lymphoid tissues following surgery, trauma or genetic defect. In another specific embodiment, polypeptides, antibodies, polynucleotides and/or agonists or antagonists of the present invention are used in the pretreatment of bone marrow samples prior to transplant.

[0557] In another specific embodiment, polypeptides, antibodies, polynucleotides and/or agonists or antagonists of the present invention are used as a gene-based therapy for genetically inherited disorders resulting in immuno-incompetence/immunodeficiency such as observed among SCID patients.

[0558] In another specific embodiment, polypeptides, antibodies, polynucleotides and/or agonists or antagonists of the present invention are used as a means of activating monocytes/macrophages to defend against parasitic diseases that effect monocytes such as Leishmania.

[0559] In another specific embodiment, polypeptides, antibodies, polynucleotides and/or agonists or antagonists of the present invention are used as a means of regulating secreted cytokines that are elicited by polypeptides of the invention.

[0560] In another embodiment, polypeptides, antibodies, polynucleotides and/or agonists or antagonists of the present invention are used in one or more of the applications decribed herein, as they may apply to veterinary medicine.

[0561] In another specific embodiment, polypeptides, antibodies, polynucleotides and/or agonists or antagonists of the present invention are used as a means of blocking various aspects of immune responses to foreign agents or self. Examples of diseases or conditions in which blocking of certain aspects of immune responses may be desired include autoimmune disorders such as lupus, and arthritis, as well as immunoresponsiveness to skin allergies, inflammation, bowel disease, injury and diseases/disorders associated with pathogens.

[0562] In another specific embodiment, polypeptides, antibodies, polynucleotides and/or agonists or antagonists of the present invention are used as a therapy for preventing the B cell proliferation and Ig secretion associated with autoimmune diseases such as idiopathic thrombocytopenic purpura, systemic lupus erythematosus and multiple sclerosis.

[0563] In another specific embodiment, polypeptides, antibodies, polynucleotides and/or agonists or antagonists of the present invention are used as a inhibitor of B and/or T cell migration in endothelial cells. This activity disrupts tissue architecture or cognate responses and is useful, for example in disrupting immune responses, and blocking sepsis.

[0564] In another specific embodiment, polypeptides, antibodies, polynucleotides and/or agonists or antagonists of the present invention are used as a therapy for chronic hypergammaglobulinemia evident in such diseases as monoclonal gammopathy of undetermined significance (MGUS), Waldenstrom's disease, related idiopathic monoclonal gammopathies, and plasmacytomas.

[0565] In another specific embodiment, polypeptides, antibodies, polynucleotides and/or agonists or antagonists of the present invention may be employed for instance to inhibit polypeptide chemotaxis and activation of macrophages and their precursors, and of neutrophils, basophils, B lymphocytes and some T-cell subsets, e.g., activated and CD8 cytotoxic T cells and natural killer cells, in certain autoimmune and chronic inflammatory and infective diseases. Examples of autoimmune diseases are described herein and include multiple sclerosis, and insulin-dependent diabetes.

[0566] The polypeptides, antibodies, polynucleotides and/or agonists or antagonists of the present invention may also be employed to treat idiopathic hyper-eosinophilic syndrome by, for example, preventing eosinophil production and migration.

[0567] In another specific embodiment, polypeptides, antibodies, polynucleotides and/or agonists or antagonists of the present invention are used to enhance or inhibit complement mediated cell lysis.

[0568] In another specific embodiment, polypeptides, antibodies, polynucleotides and/or agonists or antagonists of the present invention are used to enhance or inhibit antibody dependent cellular cytotoxicity.

[0569] In another specific embodiment, polypeptides, antibodies, polynucleotides and/or agonists or antagonists of the present invention may also be employed for treating atherosclerosis, for example, by preventing monocyte infiltration in the artery wall.

[0570] In another specific embodiment, polypeptides, antibodies, polynucleotides and/or agonists or antagonists of the present invention may be employed to treat adult respiratory distress syndrome (ARDS).

[0571] In another specific embodiment, polypeptides, antibodies, polynucleotides and/or agonists or antagonists of the present invention may be useful for stimulating wound and tissue repair, stimulating angiogenesis, and/or stimulating the repair of vascular or lymphatic diseases or disorders. Additionally, agonists and antagonists of the invention may be used to stimulate the regeneration of mucosal surfaces.

[0572] In a specific embodiment, polynucleotides or polypeptides, and/or agonists thereof are used to diagnose, prognose, treat, and/or prevent a disorder characterized by primary or acquired immunodeficiency, deficient serum immunoglobulin production, recurrent infections, and/or immune system dysfunction. Moreover, polynucleotides or polypeptides, and/or agonists thereof may be used to treat or prevent infections of the joints, bones, skin, and/or parotid glands, blood-borne infections (e.g., sepsis, meningitis, septic arthritis, and/or osteomyelitis), autoimmune diseases (e.g., those disclosed herein), inflammatory disorders, and malignancies, and/or any disease or disorder or condition associated with these infections, diseases, disorders and/or malignancies) including, but not limited to, CVID, other primary immune deficiencies, HIV disease, CLL, recurrent bronchitis, sinusitis, otitis media, conjunctivitis, pneumonia, hepatitis, meningitis, herpes zoster (e.g., severe herpes zoster), and/or pneumocystis carnii. Other diseases and disorders that may be prevented, diagnosed, prognosed, and/or treated with polynucleotides or polypeptides, and/or agonists of the present invention include, but are not limited to, HIV infection, HTLV-BLV infection, lymphopenia, phagocyte bactericidal dysfunction anemia, thrombocytopenia, and hemoglobinuria.

[0573] In another embodiment, polynucleotides, polypeptides, antibodies, and/or agonists or antagonists of the present invention are used to treat, and/or diagnose an individual having common variable immunodeficiency disease (“CVID”; also known as “acquired agammaglobulinemia” and “acquired hypogammaglobulinemia”) or a subset of this disease.

[0574] In a specific embodiment, polynucleotides, polypeptides, antibodies, and/or agonists or antagonists of the present invention may be used to diagnose, prognose, prevent, and/or treat cancers or neoplasms including immune cell or immune tissue-related cancers or neoplasms. Examples of cancers or neoplasms that may be prevented, diagnosed, or treated by polynucleotides, polypeptides, antibodies, and/or agonists or antagonists of the present invention include, but are not limited to, acute myelogenous leukemia, chronic myelogenous leukemia, Hodgkin's disease, non-Hodgkin's lymphoma, acute lymphocytic anemia (ALL) Chronic lymphocyte leukemia, plasmacytomas, multiple myeloma, Burkitt's lymphoma, EBV-transformed diseases, and/or diseases and disorders described in the section entitled “Hyperproliferative Disorders” elsewhere herein.

[0575] In another specific embodiment, polypeptides, antibodies, polynucleotides and/or agonists or antagonists of the present invention are used as a therapy for decreasing cellular proliferation of Large B-cell Lymphomas.

[0576] In another specific embodiment, polypeptides, antibodies, polynucleotides and/or agonists or antagonists of the present invention are used as a means of decreasing the involvement of B cells and Ig associated with Chronic Myelogenous Leukemia.

[0577] In specific embodiments, the compositions of the invention are used as an agent to boost immunoresponsiveness among B cell immunodeficient individuals, such as, for example, an individual who has undergone a partial or complete splenectomy.

[0578] Antagonists of the invention include, for example, binding and/or inhibitory antibodies, antisense nucleic acids, ribozymes or soluble forms of the polypeptides of the present invention (e.g., Fc fusion protein; see, e.g., Example 9). Agonists of the invention include, for example, binding or stimulatory antibodies, and soluble forms of the polypeptides (e.g., Fc fusion proteins; see, e.g., Example 9). polypeptides, antibodies, polynucleotides and/or agonists or antagonists of the present invention may be employed in a composition with a pharmaceutically acceptable carrier, e.g., as described herein.

[0579] In another embodiment, polypeptides, antibodies, polynucleotides and/or agonists or antagonists of the present invention are administered to an animal (including, but not limited to, those listed above, and also including transgenic animals) incapable of producing functional endogenous antibody molecules or having an otherwise compromised endogenous immune system, but which is capable of producing human immunoglobulin molecules by means of a reconstituted or partially reconstituted immune system from another animal (see, e.g., published PCT Application Nos. WO98/24893, WO/9634096, WO/9633735, and WO/9110741). Administration of polypeptides, antibodies, polynucleotides and/or agonists or antagonists of the present invention to such animals is useful for the generation of monoclonal antibodies against the polypeptides, antibodies, polynucleotides and/or agonists or antagonists of the present invention.

[0580] Hyperproliferative Disorders

[0581] In certain embodiments, polynucleotides or polypeptides, or agonists or antagonists of the present invention can be used to treat or detect hyperproliferative disorders, including neoplasms. Polynucleotides or polypeptides, or agonists or antagonists of the present invention may inhibit the proliferation of the disorder through direct or indirect interactions. Alternatively, Polynucleotides or polypeptides, or agonists or antagonists of the present invention may proliferate other cells which can inhibit the hyperproliferative disorder.

[0582] For example, by increasing an immune response, particularly increasing antigenic qualities of the hyperproliferative disorder or by proliferating, differentiating, or mobilizing T-cells, hyperproliferative disorders can be treated. This immune response may be increased by either enhancing an existing immune response, or by initiating a new immune response. Alternatively, decreasing an immune response may also be a method of treating hyperproliferative disorders, such as a chemotherapeutic agent.

[0583] Examples of hyperproliferative disorders that can be treated or detected by polynucleotides or polypeptides, or agonists or antagonists of the present invention include, but are not limited to neoplasms located in the: colon, abdomen, bone, breast, digestive system, liver, pancreas, peritoneum, endocrine glands (adrenal, parathyroid, pituitary, testicles, ovary, thymus, thyroid), eye, head and neck, nervous (central and peripheral), lymphatic system, pelvis, skin, soft tissue, spleen, thorax, and urogenital tract.

[0584] Similarly, other hyperproliferative disorders can also be treated or detected by polynucleotides or polypeptides, or agonists or antagonists of the present invention. Examples of such hyperproliferative disorders include, but are not limited to: Acute Childhood Lymphoblastic Leukemia, Acute Lymphoblastic Leukemia, Acute Lymphocytic Leukemia, Acute Myeloid Leukemia, Adrenocortical Carcinoma, Adult (Primary) Hepatocellular Cancer, Adult (Primary) Liver Cancer, Adult Acute Lymphocytic Leukemia, Adult Acute Myeloid Leukemia, Adult Hodgkin's Disease, Adult Hodgkin's Lymphoma, Adult Lymphocytic Leukemia, Adult Non-Hodgkin's Lymphoma, Adult Primary Liver Cancer, Adult Soft Tissue Sarcoma, AIDS-Related Lymphoma, AIDS-Related Malignancies, Anal Cancer, Astrocytoma, Bile Duct Cancer, Bladder Cancer, Bone Cancer, Brain Stem Glioma, Brain Tumors, Breast Cancer, Cancer of the Renal Pelvis and Ureter, Central Nervous System (Primary) Lymphoma, Central Nervous System Lymphoma, Cerebellar Astrocytoma, Cerebral Astrocytoma, Cervical Cancer, Childhood (Primary) Hepatocellular Cancer, Childhood (Primary) Liver Cancer, Childhood Acute Lymphoblastic Leukemia, Childhood Acute Myeloid Leukemia, Childhood Brain Stem Glioma, Childhood Cerebellar Astrocytoma, Childhood Cerebral Astrocytoma, Childhood Extracranial Germ Cell Tumors, Childhood Hodgkin's Disease, Childhood Hodgkin's Lymphoma, Childhood Hypothalamic and Visual Pathway Glioma, Childhood Lymphoblastic Leukemia, Childhood Medulloblastoma, Childhood Non-Hodgkin's Lymphoma, Childhood Pineal and Supratentorial Primitive Neuroectodermal Tumors, Childhood Primary Liver Cancer, Childhood Rhabdomyosarcoma, Childhood Soft Tissue Sarcoma, Childhood Visual Pathway and Hypothalamic Glioma, Chronic Lymphocytic Leukemia, Chronic Myelogenous Leukemia, Colon Cancer, Cutaneous T-Cell Lymphoma, Endocrine Pancreas Islet Cell Carcinoma, Endometrial Cancer, Ependymoma, Epithelial Cancer, Esophageal Cancer, Ewing's Sarcoma and Related Tumors, Exocrine Pancreatic Cancer, Extracranial Germ Cell Tumor, Extragonadal Germ Cell Tumor, Extrahepatic Bile Duct Cancer, Eye Cancer, Female Breast Cancer, Gaucher's Disease, Gallbladder Cancer, Gastric Cancer, Gastrointestinal Carcinoid Tumor, Gastrointestinal Tumors, Germ Cell Tumors, Gestational Trophoblastic Tumor, Hairy Cell Leukemia, Head and Neck Cancer, Hepatocellular Cancer, Hodgkin's Disease, Hodgkin's Lymphoma, Hypergammaglobulinemia, Hypopharyngeal Cancer, Intestinal Cancers, Intraocular Melanoma, Islet Cell Carcinoma, Islet Cell Pancreatic Cancer, Kaposi's Sarcoma, Kidney Cancer, Laryngeal Cancer, Lip and Oral Cavity Cancer, Liver Cancer, Lung Cancer, Lymphoproliferative Disorders, Macroglobulinemia, Male Breast Cancer, Malignant Mesothelioma, Malignant Thymoma, Medulloblastoma, Melanoma, Mesothelioma, Metastatic Occult Primary Squamous Neck Cancer, Metastatic Primary Squamous Neck Cancer, Metastatic Squamous Neck Cancer, Multiple Myeloma, Multiple Myeloma/Plasma Cell Neoplasm, Myelodysplastic Syndrome, Myelogenous Leukemia, Myeloid Leukemia, Myeloproliferative Disorders, Nasal Cavity and Paranasal Sinus Cancer, Nasopharyngeal Cancer, Neuroblastoma, Non-Hodgkin's Lymphoma During Pregnancy, Nonmelanoma Skin Cancer, Non-Small Cell Lung Cancer, Occult Primary Metastatic Squamous Neck Cancer, Oropharyngeal Cancer, Osteo-/Malignant Fibrous Sarcoma, Osteosarcoma/Malignant Fibrous Histiocytoma, Osteosarcoma/Malignant Fibrous Histiocytoma of Bone, Ovarian Epithelial Cancer, Ovarian Germ Cell Tumor, Ovarian Low Malignant Potential Tumor, Pancreatic Cancer, Paraproteinemias, Purpura, Parathyroid Cancer, Penile Cancer, Pheochromocytoma, Pituitary Tumor, Plasma Cell Neoplasm/Multiple Myeloma, Primary Central Nervous System Lymphoma, Primary Liver Cancer, Prostate Cancer, Rectal Cancer, Renal Cell Cancer, Renal Pelvis and Ureter Cancer, Retinoblastoma, Rhabdomyosarcoma, Salivary Gland Cancer, Sarcoidosis Sarcomas, Sezary Syndrome, Skin Cancer, Small Cell Lung Cancer, Small Intestine Cancer, Soft Tissue Sarcoma, Squamous Neck Cancer, Stomach Cancer, Supratentorial Primitive Neuroectodermal and Pineal Tumors, T-Cell Lymphoma, Testicular Cancer, Thymoma, Thyroid Cancer, Transitional Cell Cancer of the Renal Pelvis and Ureter, Transitional Renal Pelvis and Ureter Cancer, Trophoblastic Tumors, Ureter and Renal Pelvis Cell Cancer, Urethral Cancer, Uterine Cancer, Uterine Sarcoma, Vaginal Cancer, Visual Pathway and Hypothalamic Glioma, Vulvar Cancer, Waldenstrom's Macroglobulinemia, Wilms' Tumor, and any other hyperproliferative disease, besides neoplasia, located in an organ system listed above.

[0585] In another preferred embodiment, polynucleotides or polypeptides, or agonists or antagonists of the present invention are used to diagnose, prognose, prevent, and/or treat premalignant conditions and to prevent progression to a neoplastic or malignant state, including but not limited to those disorders described above. Such uses are indicated in conditions known or suspected of preceding progression to neoplasia or cancer, in particular, where non-neoplastic cell growth consisting of hyperplasia, metaplasia, or most particularly, dysplasia has occurred (for review of such abnormal growth conditions, see Robbins and Angell, 1976, Basic Pathology, 2d Ed., W. B. Saunders Co., Philadelphia, pp. 68-79.)

[0586] Hyperplasia is a form of controlled cell proliferation, involving an increase in cell number in a tissue or organ, without significant alteration in structure or function. Hyperplastic disorders which can be diagnosed, prognosed, prevented, and/or treated with compositions of the invention (including polynucleotides, polypeptides, agonists or antagonists) include, but are not limited to, angiofollicular mediastinal lymph node hyperplasia, angiolymphoid hyperplasia with eosinophilia, atypical melanocytic hyperplasia, basal cell hyperplasia, benign giant lymph node hyperplasia, cementum hyperplasia, congenital adrenal hyperplasia, congenital sebaceous hyperplasia, cystic hyperplasia, cystic hyperplasia of the breast, denture hyperplasia, ductal hyperplasia, endometrial hyperplasia, fibromuscular hyperplasia, focal epithelial hyperplasia, gingival hyperplasia, inflammatory fibrous hyperplasia, inflammatory papillary hyperplasia, intravascular papillary endothelial hyperplasia, nodular hyperplasia of prostate, nodular regenerative hyperplasia, pseudoepitheliomatous hyperplasia, senile sebaceous hyperplasia, and verrucous hyperplasia.

[0587] Metaplasia is a form of controlled cell growth in which one type of adult or fully differentiated cell substitutes for another type of adult cell. Metaplastic disorders which can be diagnosed, prognosed, prevented, and/or treated with compositions of the invention (including polynucleotides, polypeptides, agonists or antagonists) include, but are not limited to, agnogenic myeloid metaplasia, apocrine metaplasia, atypical metaplasia, autoparenchymatous metaplasia, connective tissue metaplasia, epithelial metaplasia, intestinal metaplasia, metaplastic anemia, metaplastic ossification, metaplastic polyps, myeloid metaplasia, primary myeloid metaplasia, secondary myeloid metaplasia, squamous metaplasia, squamous metaplasia of amnion, and symptomatic myeloid metaplasia.

[0588] Dysplasia is frequently a forerunner of cancer, and is found mainly in the epithelia; it is the most disorderly form of non-neoplastic cell growth, involving a loss in individual cell uniformity and in the architectural orientation of cells. Dysplastic cells often have abnormally large, deeply stained nuclei, and exhibit pleomorphism. Dysplasia characteristically occurs where there exists chronic irritation or inflammation. Dysplastic disorders which can be diagnosed, prognosed, prevented, and/or treated with compositions of the invention (including polynucleotides, polypeptides, agonists or antagonists) include, but are not limited to, anhidrotic ectodermal dysplasia, anterofacial dysplasia, asphyxiating thoracic dysplasia, atriodigital dysplasia, bronchopulmonary dysplasia, cerebral dysplasia, cervical dysplasia, chondroectodermal dysplasia, cleidocranial dysplasia, congenital ectodermal dysplasia, craniodiaphysial dysplasia, craniocarpotarsal dysplasia, craniometaphysial dysplasia, dentin dysplasia, diaphysial dysplasia, ectodermal dysplasia, enamel dysplasia, encephalo-ophthalmic dysplasia, dysplasia epiphysialis hemimelia, dysplasia epiphysialis multiplex, dysplasia epiphysialis punctata, epithelial dysplasia, faciodigitogenital dysplasia, familial fibrous dysplasia of jaws, familial white folded dysplasia, fibromuscular dysplasia, fibrous dysplasia of bone, florid osseous dysplasia, hereditary renal-retinal dysplasia, hidrotic ectodermal dysplasia, hypohidrotic ectodermal dysplasia, lymphopenic thymic dysplasia, mammary dysplasia, mandibulofacial dysplasia, metaphysial dysplasia, Mondini dysplasia, monostotic fibrous dysplasia, mucoepithelial dysplasia, multiple epiphysial dysplasia, oculoauriculovertebral dysplasia, oculodentodigital dysplasia, oculovertebral dysplasia, odontogenic dysplasia, ophthalmomandibulomelic dysplasia, periapical cemental dysplasia, polyostotic fibrous dysplasia, pseudoachondroplastic spondyloepiphysial dysplasia, retinal dysplasia, septo-optic dysplasia, spondyloepiphysial dysplasia, and ventriculoradial dysplasia.

[0589] Additional pre-neoplastic disorders which can be diagnosed, prognosed, prevented, and/or treated with compositions of the invention (including polynucleotides, polypeptides, agonists or antagonists) include, but are not limited to, benign dysproliferative disorders (e.g., benign tumors, fibrocystic conditions, tissue hypertrophy, intestinal polyps, colon polyps, and esophageal dysplasia), leukoplakia, keratoses, Bowen's disease, Farmer's Skin, solar cheilitis, and solar keratosis.

[0590] In another embodiment, a polypeptide of the invention, or polynucleotides, antibodies, agonists, or antagonists corresponding to that polypeptide, may be used to diagnose and/or prognose disorders associated with the tissue(s) in which the polypeptide of the invention is expressed, including one, two, three, four, five, or more tissues disclosed in Table 1A, column 8 (Tissue Distribution Library Code).

[0591] In another embodiment, polynucleotides, polypeptides, antibodies, and/or agonists or antagonists of the present invention conjugated to a toxin or a radioactive isotope, as described herein, may be used to treat cancers and neoplasms, including, but not limited to those described herein. In a further preferred embodiment, polynucleotides, polypeptides, antibodies, and/or agonists or antagonists of the present invention conjugated to a toxin or a radioactive isotope, as described herein, may be used to treat acute myelogenous leukemia.

[0592] Additionally, polynucleotides, polypeptides, and/or agonists or antagonists of the invention may affect apoptosis, and therefore, would be useful in treating a number of diseases associated with increased cell survival or the inhibition of apoptosis. For example, diseases associated with increased cell survival or the inhibition of apoptosis that could be diagnosed, prognosed, prevented, and/or treated by polynucleotides, polypeptides, and/or agonists or antagonists of the invention, include cancers (such as follicular lymphomas, carcinomas with p53 mutations, and hormone-dependent tumors, including, but not limited to colon cancer, cardiac tumors, pancreatic cancer, melanoma, retinoblastoma, glioblastoma, lung cancer, intestinal cancer, testicular cancer, stomach cancer, neuroblastoma, myxoma, myoma, lymphoma, endothelioma, osteoblastoma, osteoclastoma, osteosarcoma, chondrosarcoma, adenoma, breast cancer, prostate cancer, Kaposi's sarcoma and ovarian cancer); autoimmune disorders such as, multiple sclerosis, Sjogren's syndrome, Hashimoto's thyroiditis, biliary cirrhosis, Behcet's disease, Crohn's disease, polymyositis, systemic lupus erythematosus and immune-related glomerulonephritis and rheumatoid arthritis) and viral infections (such as herpes viruses, pox viruses and adenoviruses), inflammation, graft v. host disease, acute graft rejection, and chronic graft rejection.

[0593] In preferred embodiments, polynucleotides, polypeptides, and/or agonists or antagonists of the invention are used to inhibit growth, progression, and/or metastasis of cancers, in particular those listed above.

[0594] Additional diseases or conditions associated with increased cell survival that could be diagnosed, prognosed, prevented, and/or treated by polynucleotides, polypeptides, and/or agonists or antagonists of the invention, include, but are not limited to, progression, and/or metastases of malignancies and related disorders such as leukemia (including acute leukemias (e.g., acute lymphocytic leukemia, acute myelocytic leukemia (including myeloblastic, promyelocytic, myelomonocytic, monocytic, and erythroleukemia)) and chronic leukemias (e.g., chronic myelocytic (granulocytic) leukemia and chronic lymphocytic leukemia)), polycythemia vera, lymphomas (e.g., Hodgkin's disease and non-Hodgkin's disease), multiple myeloma, Waldenstrom's macroglobulinemia, heavy chain disease, and solid tumors including, but not limited to, sarcomas and carcinomas such as fibrosarcoma, myxosarcoma, liposarcoma, chondrosarcoma, osteogenic sarcoma, chordoma, angiosarcoma, endotheliosarcoma, lymphangiosarcoma, lymphangioendotheliosarcoma, synovioma, mesothelioma, Ewing's tumor, leiomyosarcoma, rhabdomyosarcoma, colon carcinoma, pancreatic cancer, breast cancer, ovarian cancer, prostate cancer, squamous cell carcinoma, basal cell carcinoma, adenocarcinoma, sweat gland carcinoma, sebaceous gland carcinoma, papillary carcinoma, papillary adenocarcinomas, cystadenocarcinoma, medullary carcinoma, bronchogenic carcinoma, renal cell carcinoma, hepatoma, bile duct carcinoma, choriocarcinoma, seminoma, embryonal carcinoma, Wilm's tumor, cervical cancer, testicular tumor, lung carcinoma, small cell lung carcinoma, bladder carcinoma, epithelial carcinoma, glioma, astrocytoma, medulloblastoma, craniopharyngioma, ependymoma, pinealoma, emangioblastoma, acoustic neuroma, oligodendroglioma, menangioma, melanoma, neuroblastoma, and retinoblastoma.

[0595] Diseases associated with increased apoptosis that could be diagnosed, prognosed, prevented, and/or treated by polynucleotides, polypeptides, and/or agonists or antagonists of the invention, include AIDS; neurodegenerative disorders (such as Alzheimer's disease, Parkinson's disease, amyotrophic lateral sclerosis, retinitis pigmentosa, cerebellar degeneration and brain tumor or prior associated disease); autoimmune disorders (such as, multiple sclerosis, Sjogren's syndrome, Hashimoto's thyroiditis, biliary cirrhosis, Behcet's disease, Crohn's disease, polymyositis, systemic lupus erythematosus and immune-related glomerulonephritis and rheumatoid arthritis) myelodysplastic syndromes (such as aplastic anemia), graft v. host disease, ischemic injury (such as that caused by myocardial infarction, stroke and reperfusion injury), liver injury (e.g., hepatitis related liver injury, ischemia/reperfusion injury, cholestosis (bile duct injury) and liver cancer); toxin-induced liver disease (such as that caused by alcohol), septic shock, cachexia and anorexia.

[0596] Hyperproliferative diseases and/or disorders that could be diagnosed, prognosed, prevented, and/or treated by polynucleotides, polypeptides, and/or agonists or antagonists of the invention, include, but are not limited to, neoplasms located in the liver, abdomen, bone, breast, digestive system, pancreas, peritoneum, endocrine glands (adrenal, parathyroid, pituitary, testicles, ovary, thymus, thyroid), eye, head and neck, nervous system (central and peripheral), lymphatic system, pelvis, skin, soft tissue, spleen, thorax, and urogenital tract.

[0597] Similarly, other hyperproliferative disorders can also be diagnosed, prognosed, prevented, and/or treated by polynucleotides, polypeptides, and/or agonists or antagonists of the invention. Examples of such hyperproliferative disorders include, but are not limited to: hypergammaglobulinemia, lymphoproliferative disorders, paraproteinemias, purpura, sarcoidosis, Sezary Syndrome, Waldenstron's macroglobulinemia, Gaucher's Disease, histiocytosis, and any other hyperproliferative disease, besides neoplasia, located in an organ system listed above.

[0598] Another preferred embodiment utilizes polynucleotides of the present invention to inhibit aberrant cellular division, by gene therapy using the present invention, and/or protein fusions or fragments thereof.

[0599] Thus, the present invention provides a method for treating cell proliferative disorders by inserting into an abnormally proliferating cell a polynucleotide of the present invention, wherein said polynucleotide represses said expression.

[0600] Another embodiment of the present invention provides a method of treating cell-proliferative disorders in individuals comprising administration of one or more active gene copies of the present invention to an abnormally proliferating cell or cells. In a preferred embodiment, polynucleotides of the present invention is a DNA construct comprising a recombinant expression vector effective in expressing a DNA sequence encoding said polynucleotides. In another preferred embodiment of the present invention, the DNA construct encoding the poynucleotides of the present invention is inserted into cells to be treated utilizing a retrovirus, or more preferably an adenoviral vector (See G J. Nabel, et. al., PNAS 1999 96: 324-326, which is hereby incorporated by reference). In a most preferred embodiment, the viral vector is defective and will not transform non-proliferating cells, only proliferating cells. Moreover, in a preferred embodiment, the polynucleotides of the present invention inserted into proliferating cells either alone, or in combination with or fused to other polynucleotides, can then be modulated via an external stimulus (i.e. magnetic, specific small molecule, chemical, or drug administration, etc.), which acts upon the promoter upstream of said polynucleotides to induce expression of the encoded protein product. As such the beneficial therapeutic affect of the present invention may be expressly modulated (i.e. to increase, decrease, or inhibit expression of the present invention) based upon said external stimulus.

[0601] Polynucleotides of the present invention may be useful in repressing expression of oncogenic genes or antigens. By “repressing expression of the oncogenic genes “is intended the suppression of the transcription of the gene, the degradation of the gene transcript (pre-message RNA), the inhibition of splicing, the destruction of the messenger RNA, the prevention of the post-translational modifications of the protein, the destruction of the protein, or the inhibition of the normal function of the protein.

[0602] For local administration to abnormally proliferating cells, polynucleotides of the present invention may be administered by any method known to those of skill in the art including, but not limited to transfection, electroporation, microinjection of cells, or in vehicles such as liposomes, lipofectin, or as naked polynucleotides, or any other method described throughout the specification. The polynucleotide of the present invention may be delivered by known gene delivery systems such as, but not limited to, retroviral vectors (Gilboa, J. Virology 44:845 (1982); Hocke, Nature 320:275 (1986); Wilson, et al., Proc. Natl. Acad. Sci. U.S.A. 85:3014), vaccinia virus system (Chakrabarty et al., Mol. Cell Biol. 5:3403 (1985) or other efficient DNA delivery systems (Yates et al., Nature 313:812 (1985)) known to those skilled in the art. These references are exemplary only and are hereby incorporated by reference. In order to specifically deliver or transfect cells which are abnormally proliferating and spare non-dividing cells, it is preferable to utilize a retrovirus, or adenoviral (as described in the art and elsewhere herein) delivery system known to those of skill in the art. Since host DNA replication is required for retroviral DNA to integrate and the retrovirus will be unable to self replicate due to the lack of the retrovirus genes needed for its life cycle. Utilizing such a retroviral delivery system for polynucleotides of the present invention will target said gene and constructs to abnormally proliferating cells and will spare the non-dividing normal cells.

[0603] The polynucleotides of the present invention may be delivered directly to cell proliferative disorder/disease sites in internal organs, body cavities and the like by use of imaging devices used to guide an injecting needle directly to the disease site. The polynucleotides of the present invention may also be administered to disease sites at the time of surgical intervention.

[0604] By “cell proliferative disease” is meant any human or animal disease or disorder, affecting any one or any combination of organs, cavities, or body parts, which is characterized by single or multiple local abnormal proliferations of cells, groups of cells, or tissues, whether benign or malignant.

[0605] Any amount of the polynucleotides of the present invention may be administered as long as it has a biologically inhibiting effect on the proliferation of the treated cells. Moreover, it is possible to administer more than one of the polynucleotide of the present invention simultaneously to the same site. By “biologically inhibiting” is meant partial or total growth inhibition as well as decreases in the rate of proliferation or growth of the cells. The biologically inhibitory dose may be determined by assessing the effects of the polynucleotides of the present invention on target malignant or abnormally proliferating cell growth in tissue culture, tumor growth in animals and cell cultures, or any other method known to one of ordinary skill in the art.

[0606] The present invention is further directed to antibody-based therapies which involve administering of anti-polypeptides and anti-polynucleotide antibodies to a mammalian, preferably human, patient for treating one or more of the described disorders. Methods for producing anti-polypeptides and anti-polynucleotide antibodies polyclonal and monoclonal antibodies are described in detail elsewhere herein. Such antibodies may be provided in pharmaceutically acceptable compositions as known in the art or as described herein.

[0607] A summary of the ways in which the antibodies of the present invention may be used therapeutically includes binding polynucleotides or polypeptides of the present invention locally or systemically in the body or by direct cytotoxicity of the antibody, e.g. as mediated by complement (CDC) or by effector cells (ADCC). Some of these approaches are described in more detail below. Armed with the teachings provided herein, one of ordinary skill in the art will know how to use the antibodies of the present invention for diagnostic, monitoring or therapeutic purposes without undue experimentation.

[0608] In particular, the antibodies, fragments and derivatives of the present invention are useful for treating a subject having or developing cell proliferative and/or differentiation disorders as described herein. Such treatment comprises administering a single or multiple doses of the antibody, or a fragment, derivative, or a conjugate thereof.

[0609] The antibodies of this invention may be advantageously utilized in combination with other monoclonal or chimeric antibodies, or with lymphokines or hematopoietic growth factors, for example., which serve to increase the number or activity of effector cells which interact with the antibodies.

[0610] It is preferred to use high affinity and/or potent in vivo inhibiting and/or neutralizing antibodies against polypeptides or polynucleotides of the present invention, fragments or regions thereof, for both immunoassays directed to and therapy of disorders related to polynucleotides or polypeptides, including fragements thereof, of the present invention. Such antibodies, fragments, or regions, will preferably have an affinity for polynucleotides or polypeptides, including fragements thereof. Preferred binding affinities include those with a dissociation constant or Kd less than 5×10⁻⁶M, 10⁻⁶M, 5×10⁻⁷M, 10⁻⁷M, 5×10⁻⁸M, 10⁻⁸M, 5×10⁻⁹M, 10⁻⁹M, 5×10⁻¹⁰ M, 10⁻¹⁰M, 5×10⁻¹¹M, 10⁻¹¹M, 5×10⁻¹²M, 10⁻¹²M, 5×10⁻¹³M, 10⁻¹³M, 5×10⁻¹⁴M, 10⁻¹⁴M, 5×10⁻¹⁵M, and 10⁻¹⁵M.

[0611] Moreover, polypeptides of the present invention are useful in inhibiting the angiogenesis of proliferative cells or tissues, either alone, as a protein fusion, or in combination with other polypeptides directly or indirectly, as described elsewhere herein. In a most preferred embodiment, said anti-angiogenesis effect may be achieved indirectly, for example, through the inhibition of hematopoietic, tumor-specific cells, such as tumor-associated macrophages (See Joseph I B, et al. J Natl Cancer Inst, 90(21):1648-53 (1998), which is hereby incorporated by reference). Antibodies directed to polypeptides or polynucleotides of the present invention may also result in inhibition of angiogenesis directly, or indirectly (See Witte L, et al., Cancer Metastasis Rev. 17(2):155-61 (1998), which is hereby incorporated by reference)).

[0612] Polypeptides, including protein fusions, of the present invention, or fragments thereof may be useful in inhibiting proliferative cells or tissues through the induction of apoptosis. Said polypeptides may act either directly, or indirectly to induce apoptosis of proliferative cells and tissues, for example in the activation of a death-domain receptor, such as tumor necrosis factor (TNF) receptor-1, CD95 (Fas/APO-1), TNF-receptor-related apoptosis-mediated protein (TRAMP) and TNF-related apoptosis-inducing ligand (TRAIL) receptor-1 and -2 (See Schulze-Osthoff K, et.al., Eur J Biochem 254(3):439-59 (1998), which is hereby incorporated by reference). Moreover, in another preferred embodiment of the present invention, said polypeptides may induce apoptosis through other mechanisms, such as in the activation of other proteins which will activate apoptosis, or through stimulating the expression of said proteins, either alone or in combination with small molecule drugs or adjuviants, such as apoptonin, galectins, thioredoxins, anti-inflammatory proteins (See for example, Mutat Res 400(1-2):447-55 (1998), Med Hypotheses.50(5):423-33 (1998), Chem Biol Interact. Apr 24;111-112:23-34 (1998), J Mol Med.76(6):402-12 (1998), Int J Tissue React;20(1):3-15 (1998), which are all hereby incorporated by reference).

[0613] Polypeptides, including protein fusions to, or fragments thereof, of the present invention are useful in inhibiting the metastasis of proliferative cells or tissues. Inhibition may occur as a direct result of administering polypeptides, or antibodies directed to said polypeptides as described elsewere herein, or indirectly, such as activating the expression of proteins known to inhibit metastasis, for example alpha 4 integrins, (See, e.g., Curr Top Microbiol Immunol 1998;231:125-41, which is hereby incorporated by reference). Such thereapeutic affects of the present invention may be achieved either alone, or in combination with small molecule drugs or adjuvants.

[0614] In another embodiment, the invention provides a method of delivering compositions containing the polypeptides of the invention (e.g., compositions containing polypeptides or polypeptide antibodes associated with heterologous polypeptides, heterologous nucleic acids, toxins, or prodrugs) to targeted cells expressing the polypeptide of the present invention. Polypeptides or polypeptide antibodes of the invention may be associated with with heterologous polypeptides, heterologous nucleic acids, toxins, or prodrugs via hydrophobic, hydrophilic, ionic and/or covalent interactions.

[0615] Polypeptides, protein fusions to, or fragments thereof, of the present invention are useful in enhancing the immunogenicity and/or antigenicity of proliferating cells or tissues, either directly, such as would occur if the polypeptides of the present invention ‘vaccinated’ the immune response to respond to proliferative antigens and immunogens, or indirectly, such as in activating the expression of proteins known to enhance the immune response (e.g. chemokines), to said antigens and immunogens.

[0616] Renal Disorders

[0617] Polynucleotides, polypeptides, antibodies, and/or agonists or antagonists of the present invention, may be used to treat, prevent, diagnose, and/or prognose disorders of the renal system. Renal disorders which can be diagnosed, prognosed, prevented, and/or treated with compositions of the invention include, but are not limited to, kidney failure, nephritis, blood vessel disorders of kidney, metabolic and congenital kidney disorders, urinary disorders of the kidney, autoimmune disorders, sclerosis and necrosis, electrolyte imbalance, and kidney cancers.

[0618] Kidney diseases which can be diagnosed, prognosed, prevented, and/or treated with compositions of the invention include, but are not limited to, acute kidney failure, chronic kidney failure, atheroembolic renal failure, end-stage renal disease, inflammatory diseases of the kidney (e.g., acute glomerulonephritis, postinfectious glomerulonephritis, rapidly progressive glomerulonephritis, nephrotic syndrome, membranous glomerulonephritis, familial nephrotic syndrome, membranoproliferative glomerulonephritis I and II, mesangial proliferative glomerulonephritis, chronic glomerulonephritis, acute tubulointerstitial nephritis, chronic tubulointerstitial nephritis, acute post-streptococcal glomerulonephritis (PSGN), pyelonephritis, lupus nephritis, chronic nephritis, interstitial nephritis, and post-streptococcal glomerulonephritis), blood vessel disorders of the kidneys (e.g., kidney infarction, atheroembolic kidney disease, cortical necrosis, malignant nephrosclerosis, renal vein thrombosis, renal underperfusion, renal retinopathy, renal ischemia-reperfusion, renal artery embolism, and renal artery stenosis), and kidney disorders resulting form urinary tract disease (e.g., pyelonephritis, hydronephrosis, urolithiasis (renal lithiasis, nephrolithiasis), reflux nephropathy, urinary tract infections, urinary retention, and acute or chronic unilateral obstructive uropathy.)

[0619] In addition, compositions of the invention can be used to diagnose, prognose, prevent, and/or treat metabolic and congenital disorders of the kidney (e.g., uremia, renal amyloidosis, renal osteodystrophy, renal tubular acidosis, renal glycosuria, nephrogenic diabetes insipidus, cystinuria, Fanconi's syndrome, renal fibrocystic osteosis (renal rickets), Hartnup disease, Bartter's syndrome, Liddle's syndrome, polycystic kidney disease, medullary cystic disease, medullary sponge kidney, Alport's syndrome, nail-patella syndrome, congenital nephrotic syndrome, CRUSH syndrome, horseshoe kidney, diabetic nephropathy, nephrogenic diabetes insipidus, analgesic nephropathy, kidney stones, and membranous nephropathy), and autoimmune disorders of the kidney (e.g., systemic lupus erythematosus (SLE), Goodpasture syndrome, IgA nephropathy, and IgM mesangial proliferative glomerulonephritis).

[0620] Compositions of the invention can also be used to diagnose, prognose, prevent, and/or treat sclerotic or necrotic disorders of the kidney (e.g., glomerulosclerosis, diabetic nephropathy, focal segmental glomerulosclerosis (FSGS), necrotizing glomerulonephritis, and renal papillary necrosis), cancers of the kidney (e.g., nephroma, hypernephroma, nephroblastoma, renal cell cancer, transitional cell cancer, renal adenocarcinoma, squamous cell cancer, and Wilm's tumor), and electrolyte imbalances (e.g., nephrocalcinosis, pyuria, edema, hydronephritis, proteinuria, hyponatremia, hypernatremia, hypokalemia, hyperkalemia, hypocalcemia, hypercalcemia, hypophosphatemia, and hyperphosphatemia).

[0621] Polypeptides may be administered using any method known in the art, including, but not limited to, direct needle injection at the delivery site, intravenous injection, topical administration, catheter infusion, biolistic injectors, particle accelerators, gelfoam sponge depots, other commercially available depot materials, osmotic pumps, oral or suppositorial solid pharmaceutical formulations, decanting or topical applications during surgery, aerosol delivery. Such methods are known in the art. Polypeptides may be administered as part of a Therapeutic, described in more detail below. Methods of delivering polynucleotides are described in more detail herein.

[0622] Cardiovascular Disorders

[0623] Polynucleotides or polypeptides, or agonists or antagonists of the present invention, may be used to treat, prevent, diagnose, and/or prognose cardiovascular disorders, including, but not limited to, peripheral artery disease, such as limb ischemia.

[0624] Cardiovascular disorders include, but are not limited to, cardiovascular abnormalities, such as arterio-arterial fistula, arteriovenous fistula, cerebral arteriovenous malformations, congenital heart defects, pulmonary atresia, and Scimitar Syndrome. Congenital heart defects include, but are not limited to, aortic coarctation, cor triatriatum, coronary vessel anomalies, crisscross heart, dextrocardia, patent ductus arteriosus, Ebstein's anomaly, Eisenmenger complex, hypoplastic left heart syndrome, levocardia, tetralogy of fallot, transposition of great vessels, double outlet right ventricle, tricuspid atresia, persistent truncus arteriosus, and heart septal defects, such as aortopulmonary septal defect, endocardial cushion defects, Lutembacher's Syndrome, trilogy of Fallot, ventricular heart septal defects.

[0625] Cardiovascular disorders also include, but are not limited to, heart disease, such as arrhythmias, carcinoid heart disease, high cardiac output, low cardiac output, cardiac tamponade, endocarditis (including bacterial), heart aneurysm, cardiac arrest, congestive heart failure, congestive cardiomyopathy, paroxysmal dyspnea, cardiac edema, heart hypertrophy, congestive cardiomyopathy, left ventricular hypertrophy, right ventricular hypertrophy, post-infarction heart rupture, ventricular septal rupture, heart valve diseases, myocardial diseases, myocardial ischemia, pericardial effusion, pericarditis (including constrictive and tuberculous), pneumopericardium, postpericardiotomy syndrome, pulmonary heart disease, rheumatic heart disease, ventricular dysfunction, hyperemia, cardiovascular pregnancy complications, Scimitar Syndrome, cardiovascular syphilis, and cardiovascular tuberculosis.

[0626] Arrhythmias include, but are not limited to, sinus arrhythmia, atrial fibrillation, atrial flutter, bradycardia, extrasystole, Adams-Stokes Syndrome, bundle-branch block, sinoatrial block, long QT syndrome, parasystole, Lown-Ganong-Levine Syndrome, Mahaim-type pre-excitation syndrome, Wolff-Parkinson-White syndrome, sick sinus syndrome, tachycardias, and ventricular fibrillation. Tachycardias include paroxysmal tachycardia, supraventricular tachycardia, accelerated idioventricular rhythm, atrioventricular nodal reentry tachycardia, ectopic atrial tachycardia, ectopic junctional tachycardia, sinoatrial nodal reentry tachycardia, sinus tachycardia, Torsades de Pointes, and ventricular tachycardia.

[0627] Heart valve diseases include, but are not limited to, aortic valve insufficiency, aortic valve stenosis, hear murmurs, aortic valve prolapse, mitral valve prolapse, tricuspid valve prolapse, mitral valve insufficiency, mitral valve stenosis, pulmonary atresia, pulmonary valve insufficiency, pulmonary valve stenosis, tricuspid atresia, tricuspid valve insufficiency, and tricuspid valve stenosis.

[0628] Myocardial diseases include, but are not limited to, alcoholic cardiomyopathy, congestive cardiomyopathy, hypertrophic cardiomyopathy, aortic subvalvular stenosis, pulmonary subvalvular stenosis, restrictive cardiomyopathy, Chagas cardiomyopathy, endocardial fibroelastosis, endomyocardial fibrosis, Kearns Syndrome, myocardial reperfusion injury, and myocarditis.

[0629] Myocardial ischemias include, but are not limited to, coronary disease, such as angina pectoris, coronary aneurysm, coronary arteriosclerosis, coronary thrombosis, coronary vasospasm, myocardial infarction and myocardial stunning.

[0630] Cardiovascular diseases also include vascular diseases such as aneurysms, angiodysplasia, angiomatosis, bacillary angiomatosis, Hippel-Lindau Disease, Klippel-Trenaunay-Weber Syndrome, Sturge-Weber Syndrome, angioneurotic edema, aortic diseases, Takayasu's Arteritis, aortitis, Leriche's Syndrome, arterial occlusive diseases, arteritis, enarteritis, polyarteritis nodosa, cerebrovascular disorders, diabetic angiopathies, diabetic retinopathy, embolisms, thrombosis, erythromelalgia, hemorrhoids, hepatic veno-occlusive disease, hypertension, hypotension, ischemia, peripheral vascular diseases, phlebitis, pulmonary veno-occlusive disease, Raynaud's disease, CREST syndrome, retinal vein occlusion, Scimitar syndrome, superior vena cava syndrome, telangiectasia, atacia telangiectasia, hereditary hemorrhagic telangiectasia, varicocele, varicose veins, varicose ulcer, vasculitis, and venous insufficiency.

[0631] Aneurysms include, but are not limited to, dissecting aneurysms, false aneurysms, infected aneurysms, ruptured aneurysms, aortic aneurysms, cerebral aneurysms, coronary aneurysms, heart aneurysms, and iliac aneurysms.

[0632] Arterial occlusive diseases include, but are not limited to, arteriosclerosis, intermittent claudication, carotid stenosis, fibromuscular dysplasias, mesenteric vascular occlusion, Moyamoya disease, renal artery obstruction, retinal artery occlusion, and thromboangiitis obliterans.

[0633] Cerebrovascular disorders include, but are not limited to, carotid artery diseases, cerebral amyloid angiopathy, cerebral aneurysm, cerebral anoxia, cerebral arteriosclerosis, cerebral arteriovenous malformation, cerebral artery diseases, cerebral embolism and thrombosis, carotid artery thrombosis, sinus thrombosis, Wallenberg's syndrome, cerebral hemorrhage, epidural hematoma, subdural hematoma, subaraxhnoid hemorrhage, cerebral infarction, cerebral ischemia (including transient), subclavian steal syndrome, periventricular leukomalacia, vascular headache, cluster headache, migraine, and vertebrobasilar insufficiency.

[0634] Embolisms include, but are not limited to, air embolisms, amniotic fluid embolisms, cholesterol embolisms, blue toe syndrome, fat embolisms, pulmonary embolisms, and thromoboembolisms. Thrombosis include, but are not limited to, coronary thrombosis, hepatic vein thrombosis, retinal vein occlusion, carotid artery thrombosis, sinus thrombosis, Wallenberg's syndrome, and thrombophlebitis.

[0635] Ischemic disorders include, but are not limited to, cerebral ischemia, ischemic colitis, compartment syndromes, anterior compartment syndrome, myocardial ischemia, reperfusion injuries, and peripheral limb ischemia. Vasculitis includes, but is not limited to, aortitis, arteritis, Behcet's Syndrome, Churg-Strauss Syndrome, mucocutaneous lymph node syndrome, thromboangiitis obliterans, hypersensitivity vasculitis, Schoenlein-Henoch purpura, allergic cutaneous vasculitis, and Wegener's granulomatosis.

[0636] Polypeptides may be administered using any method known in the art, including, but not limited to, direct needle injection at the delivery site, intravenous injection, topical administration, catheter infusion, biolistic injectors, particle accelerators, gelfoam sponge depots, other commercially available depot materials, osmotic pumps, oral or suppositorial solid pharmaceutical formulations, decanting or topical applications during surgery, aerosol delivery. Such methods are known in the art. Polypeptides may be administered as part of a Therapeutic, described in more detail below. Methods of delivering polynucleotides are described in more detail herein.

[0637] Respiratory Disorders

[0638] Polynucleotides or polypeptides, or agonists or antagonists of the present invention may be used to treat, prevent, diagnose, and/or prognose diseases and/or disorders of the respiratory system.

[0639] Diseases and disorders of the respiratory system include, but are not limited to, nasal vestibulitis, nonallergic rhinitis (e.g., acute rhinitis, chronic rhinitis, atrophic rhinitis, vasomotor rhinitis), nasal polyps, and sinusitis, juvenile angiofibromas, cancer of the nose and juvenile papillomas, vocal cord polyps, nodules (singer's nodules), contact ulcers, vocal cord paralysis, laryngoceles, pharyngitis (e.g., viral and bacterial), tonsillitis, tonsillar cellulitis, parapharyngeal abscess, laryngitis, laryngoceles, and throat cancers (e.g., cancer of the nasopharynx, tonsil cancer, larynx cancer), lung cancer (e.g., squamous cell carcinoma, small cell (oat cell) carcinoma, large cell carcinoma, and adenocarcinoma), allergic disorders (eosinophilic pneumonia, hypersensitivity pneumonitis (e.g., extrinsic allergic alveolitis, allergic interstitial pneumonitis, organic dust pneumoconiosis, allergic bronchopulmonary aspergillosis, asthma, Wegener's granulomatosis (granulomatous vasculitis), Goodpasture's syndrome)), pneumonia (e.g., bacterial pneumonia (e.g., Streptococcus pneumoniae (pneumoncoccal pneumonia), Staphylococcus aureus (staphylococcal pneumonia), Gram-negative bacterial pneumonia (caused by, e.g., Klebsiella and Pseudomas spp.), Mycoplasma pneumoniae pneumonia, Hemophilus influenzae pneumonia, Legionella pneumophila (Legionnaires' disease), and Chlamydia psittaci (Psittacosis)), and viral pneumonia (e.g., influenza, chickenpox (varicella).

[0640] Additional diseases and disorders of the respiratory system include, but are not limited to bronchiolitis, polio (poliomyelitis), croup, respiratory syncytial viral infection, mumps, erythema infectiosum (fifth disease), roseola infantum, progressive rubella panencephalitis, german measles, and subacute sclerosing panencephalitis), fungal pneumonia (e.g., Histoplasmosis, Coccidioidomycosis, Blastomycosis, fungal infections in people with severely suppressed immune systems (e.g., cryptococcosis, caused by Cryptococcus neoformans; aspergillosis, caused by Aspergillus spp.; candidiasis, caused by Candida; and mucormycosis)), Pneumocystis carinii (pneumocystis pneumonia), atypical pneumonias (e.g., Mycoplasma and Chlamydia spp.), opportunistic infection pneumonia, nosocomial pneumonia, chemical pneumonitis, and aspiration pneumonia, pleural disorders (e.g., pleurisy, pleural effusion, and pneumothorax (e.g., simple spontaneous pneumothorax, complicated spontaneous pneumothorax, tension pneumothorax)), obstructive airway diseases (e.g., asthma, chronic obstructive pulmonary disease (COPD), emphysema, chronic or acute bronchitis), occupational lung diseases (e.g., silicosis, black lung (coal workers' pneumoconiosis), asbestosis, berylliosis, occupational asthsma, byssinosis, and benign pneumoconioses), Infiltrative Lung Disease (e.g., pulmonary fibrosis (e.g., fibrosing alveolitis, usual interstitial pneumonia), idiopathic pulmonary fibrosis, desquamative interstitial pneumonia, lymphoid interstitial pneumonia, histiocytosis X (e.g., Letterer-Siwe disease, Hand-Schuller-Christian disease, eosinophilic granuloma), idiopathic pulmonary hemosiderosis, sarcoidosis and pulmonary alveolar proteinosis), Acute respiratory distress syndrome (also called, e.g., adult respiratory distress syndrome), edema, pulmonary embolism, bronchitis (e.g., viral, bacterial), bronchiectasis, atelectasis, lung abscess (caused by, e.g., Staphylococcus aureus or Legionella pneumophila), and cystic fibrosis.

[0641] Anti-angiogenesis Activity

[0642] The naturally occurring balance between endogenous stimulators and inhibitors of angiogenesis is one in which inhibitory influences predominate. Rastinejad et al., Cell 56:345-355 (1989). In those rare instances in which neovascularization occurs under normal physiological conditions, such as wound healing, organ regeneration, embryonic development, and female reproductive processes, angiogenesis is stringently regulated and spatially and temporally delimited. Under conditions of pathological angiogenesis such as that characterizing solid tumor growth, these regulatory controls fail. Unregulated angiogenesis becomes pathologic and sustains progression of many neoplastic and non-neoplastic diseases. A number of serious diseases are dominated by abnormal neovascularization including solid tumor growth and metastases, arthritis, some types of eye disorders, and psoriasis. See, e.g., reviews by Moses et al., Biotech. 9:630-634 (1991); Folkman et al., N. Engl. J. Med., 333:1757-1763 (1995); Auerbach et al., J. Microvasc. Res. 29:401-411 (1985); Folkman, Advances in Cancer Research, eds. Klein and Weinhouse, Academic Press, New York, pp. 175-203 (1985); Patz, Am. J. Opthalmol. 94:715-743 (1982); and Folkman et al., Science 221:719-725 (1983). In a number of pathological conditions, the process of angiogenesis contributes to the disease state. For example, significant data have accumulated which suggest that the growth of solid tumors is dependent on angiogenesis. Folkman and Klagsbrun, Science 235:442-447 (1987).

[0643] The present invention provides for treatment of diseases or disorders associated with neovascularization by administration of the polynucleotides and/or polypeptides of the invention, as well as agonists or antagonists of the present invention. Malignant and metastatic conditions which can be treated with the polynucleotides and polypeptides, or agonists or antagonists of the invention include, but are not limited to, malignancies, solid tumors, and cancers described herein and otherwise known in the art (for a review of such disorders, see Fishman et al., Medicine, 2d Ed., J. B. Lippincott Co., Philadelphia (1985)).Thus, the present invention provides a method of treating an angiogenesis-related disease and/or disorder, comprising administering to an individual in need thereof a therapeutically effective amount of a polynucleotide, polypeptide, antagonist and/or agonist of the invention. For example, polynucleotides, polypeptides, antagonists and/or agonists may be utilized in a variety of additional methods in order to therapeutically treat a cancer or tumor. Cancers which may be treated with polynucleotides, polypeptides, antagonists and/or agonists include, but are not limited to solid tumors, including prostate, lung, breast, ovarian, stomach, pancreas, larynx, esophagus, testes, liver, parotid, biliary tract, colon, rectum, cervix, uterus, endometrium, kidney, bladder, thyroid cancer; primary tumors and metastases; melanomas; glioblastoma; Kaposi's sarcoma; leiomyosarcoma; non- small cell lung cancer; colorectal cancer; advanced malignancies; and blood born tumors such as leukemias. For example, polynucleotides, polypeptides, antagonists and/or agonists may be delivered topically, in order to treat cancers such as skin cancer, head and neck tumors, breast tumors, and Kaposi's sarcoma.

[0644] Within yet other aspects, polynucleotides, polypeptides, antagonists and/or agonists may be utilized to treat superficial forms of bladder cancer by, for example, intravesical administration. Polynucleotides, polypeptides, antagonists and/or agonists may be delivered directly into the tumor, or near the tumor site, via injection or a catheter. Of course, as the artisan of ordinary skill will appreciate, the appropriate mode of administration will vary according to the cancer to be treated. Other modes of delivery are discussed herein.

[0645] Polynucleotides, polypeptides, antagonists and/or agonists may be useful in treating other disorders, besides cancers, which involve angiogenesis. These disorders include, but are not limited to: benign tumors, for example hemangiomas, acoustic neuromas, neurofibromas, trachomas, and pyogenic granulomas; artheroscleric plaques; ocular angiogenic diseases, for example, diabetic retinopathy, retinopathy of prematurity, macular degeneration, corneal graft rejection, neovascular glaucoma, retrolental fibroplasia, rubeosis, retinoblastoma, uvietis and Pterygia (abnormal blood vessel growth) of the eye; rheumatoid arthritis; psoriasis; delayed wound healing; endometriosis; vasculogenesis; granulations; hypertrophic scars (keloids); nonunion fractures; scleroderma; trachoma; vascular adhesions; myocardial angiogenesis; coronary collaterals; cerebral collaterals; arteriovenous malformations; ischemic limb angiogenesis; Osler-Webber Syndrome; plaque neovascularization; telangiectasia; hemophiliac joints; angiofibroma; fibromuscular dysplasia; wound granulation; Crohn's disease; and atherosclerosis.

[0646] For example, within one aspect of the present invention methods are provided for treating hypertrophic scars and keloids, comprising the step of administering a polynucleotide, polypeptide, antagonist and/or agonist of the invention to a hypertrophic scar or keloid.

[0647] Within one embodiment of the present invention polynucleotides, polypeptides, antagonists and/or agonists of the invention are directly injected into a hypertrophic scar or keloid, in order to prevent the progression of these lesions. This therapy is of particular value in the prophylactic treatment of conditions which are known to result in the development of hypertrophic scars and keloids (e.g., bums), and is preferably initiated after the proliferative phase has had time to progress (approximately 14 days after the initial injury), but before hypertrophic scar or keloid development. As noted above, the present invention also provides methods for treating neovascular diseases of the eye, including for example, corneal neovascularization, neovascular glaucoma, proliferative diabetic retinopathy, retrolental fibroplasia and macular degeneration.

[0648] Moreover, Ocular disorders associated with neovascularization which can be treated with the polynucleotides and polypeptides of the present invention (including agonists and/or antagonists) include, but are not limited to: neovascular glaucoma, diabetic retinopathy, retinoblastoma, retrolental fibroplasia, uveitis, retinopathy of prematurity macular degeneration, corneal graft neovascularization, as well as other eye inflammatory diseases, ocular tumors and diseases associated with choroidal or iris neovascularization. See, e.g., reviews by Waltman et al., Am. J. Ophthal. 85:704-710 (1978) and Gartner et al., Surv. Ophthal. 22:291-312 (1978).

[0649] Thus, within one aspect of the present invention methods are provided for treating neovascular diseases of the eye such as corneal neovascularization (including corneal graft neovascularization), comprising the step of administering to a patient a therapeutically effective amount of a compound (as described above) to the cornea, such that the formation of blood vessels is inhibited. Briefly, the cornea is a tissue which normally lacks blood vessels. In certain pathological conditions however, capillaries may extend into the cornea from the pericorneal vascular plexus of the limbus. When the cornea becomes vascularized, it also becomes clouded, resulting in a decline in the patient's visual acuity. Visual loss may become complete if the cornea completely opacitates. A wide variety of disorders can result in corneal neovascularization, including for example, corneal infections (e.g., trachoma, herpes simplex keratitis, leishmaniasis and onchocerciasis), immunological processes (e.g., graft rejection and Stevens-Johnson's syndrome), alkali burns, trauma, inflammation (of any cause), toxic and nutritional deficiency states, and as a complication of wearing contact lenses.

[0650] Within particularly preferred embodiments of the invention, may be prepared for topical administration in saline (combined with any of the preservatives and antimicrobial agents commonly used in ocular preparations), and administered in eyedrop form. The solution or suspension may be prepared in its pure form and administered several times daily. Alternatively, anti-angiogenic compositions, prepared as described above, may also be administered directly to the cornea. Within preferred embodiments, the anti-angiogenic composition is prepared with a muco-adhesive polymer which binds to cornea. Within further embodiments, the anti-angiogenic factors or anti-angiogenic compositions may be utilized as an adjunct to conventional steroid therapy. Topical therapy may also be useful prophylactically in corneal lesions which are known to have a high probability of inducing an angiogenic response (such as chemical burns). In these instances the treatment, likely in combination with steroids, may be instituted immediately to help prevent subsequent complications.

[0651] Within other embodiments, the compounds described above may be injected directly into the corneal stroma by an ophthalmologist under microscopic guidance. The preferred site of injection may vary with the morphology of the individual lesion, but the goal of the administration would be to place the composition at the advancing front of the vasculature (i.e., interspersed between the blood vessels and the normal cornea). In most cases this would involve perilimbic corneal injection to “protect” the cornea from the advancing blood vessels. This method may also be utilized shortly after a corneal insult in order to prophylactically prevent corneal neovascularization. In this situation the material could be injected in the perilimbic cornea interspersed between the corneal lesion and its undesired potential limbic blood supply. Such methods may also be utilized in a similar fashion to prevent capillary invasion of transplanted corneas. In a sustained-release form injections might only be required 2-3 times per year. A steroid could also be added to the injection solution to reduce inflammation resulting from the injection itself.

[0652] Within another aspect of the present invention, methods are provided for treating neovascular glaucoma, comprising the step of administering to a patient a therapeutically effective amount of a polynucleotide, polypeptide, antagonist and/or agonist to the eye, such that the formation of blood vessels is inhibited. In one embodiment, the compound may be administered topically to the eye in order to treat early forms of neovascular glaucoma. Within other embodiments, the compound may be implanted by injection into the region of the anterior chamber angle. Within other embodiments, the compound may also be placed in any location such that the compound is continuously released into the aqueous humor. Within another aspect of the present invention, methods are provided for treating proliferative diabetic retinopathy, comprising the step of administering to a patient a therapeutically effective amount of a polynucleotide, polypeptide, antagonist and/or agonist to the eyes, such that the formation of blood vessels is inhibited.

[0653] Within particularly preferred embodiments of the invention, proliferative diabetic retinopathy may be treated by injection into the aqueous humor or the vitreous, in order to increase the local concentration of the polynucleotide, polypeptide, antagonist and/or agonist in the retina. Preferably, this treatment should be initiated prior to the acquisition of severe disease requiring photocoagulation.

[0654] Within another aspect of the present invention, methods are provided for treating retrolental fibroplasia, comprising the step of administering to a patient a therapeutically effective amount of a polynucleotide, polypeptide, antagonist and/or agonist to the eye, such that the formation of blood vessels is inhibited. The compound may be administered topically, via intravitreous injection and/or via intraocular implants.

[0655] Additionally, disorders which can be treated with the polynucleotides, polypeptides, agonists and/or agonists include, but are not limited to, hemangioma, arthritis, psoriasis, angiofibroma, atherosclerotic plaques, delayed wound healing, granulations, hemophilic joints, hypertrophic scars, nonunion fractures, Osler-Weber syndrome, pyogenic granuloma, scleroderma, trachoma, and vascular adhesions.

[0656] Moreover, disorders and/or states, which can be treated, prevented, diagnosed, and/or prognosed with the the polynucleotides, polypeptides, agonists and/or agonists of the invention include, but are not limited to, solid tumors, blood born tumors such as leukemias, tumor metastasis, Kaposi's sarcoma, benign tumors, for example hemangiomas, acoustic neuromas, neurofibromas, trachomas, and pyogenic granulomas, rheumatoid arthritis, psoriasis, ocular angiogenic diseases, for example, diabetic retinopathy, retinopathy of prematurity, macular degeneration, corneal graft rejection, neovascular glaucoma, retrolental fibroplasia, rubeosis, retinoblastoma, and uvietis, delayed wound healing, endometriosis, vascluogenesis, granulations, hypertrophic scars (keloids), nonunion fractures, scleroderma, trachoma, vascular adhesions, myocardial angiogenesis, coronary collaterals, cerebral collaterals, arteriovenous malformations, ischemic limb angiogenesis, Osler-Webber Syndrome, plaque neovascularization, telangiectasia, hemophiliac joints, angiofibroma fibromuscular dysplasia, wound granulation, Crohn's disease, atherosclerosis, birth control agent by preventing vascularization required for embryo implantation controlling menstruation, diseases that have angiogenesis as a pathologic consequence such as cat scratch disease (Rochele minalia quintosa), ulcers (Helicobacter pylori), Bartonellosis and bacillary angiomatosis.

[0657] In one aspect of the birth control method, an amount of the compound sufficient to block embryo implantation is administered before or after intercourse and fertilization have occurred, thus providing an effective method of birth control, possibly a “morning after” method. Polynucleotides, polypeptides, agonists and/or agonists may also be used in controlling menstruation or administered as either a peritoneal lavage fluid or for peritoneal implantation in the treatment of endometriosis.

[0658] Polynucleotides, polypeptides, agonists and/or agonists of the present invention may be incorporated into surgical sutures in order to prevent stitch granulomas.

[0659] Polynucleotides, polypeptides, agonists and/or agonists may be utilized in a wide variety of surgical procedures. For example, within one aspect of the present invention a compositions (in the form of, for example, a spray or film) may be utilized to coat or spray an area prior to removal of a tumor, in order to isolate normal surrounding tissues from malignant tissue, and/or to prevent the spread of disease to surrounding tissues. Within other aspects of the present invention, compositions (e.g., in the form of a spray) may be delivered via endoscopic procedures in order to coat tumors, or inhibit angiogenesis in a desired locale. Within yet other aspects of the present invention, surgical meshes which have been coated with anti- angiogenic compositions of the present invention may be utilized in any procedure wherein a surgical mesh might be utilized. For example, within one embodiment of the invention a surgical mesh laden with an anti-angiogenic composition may be utilized during abdominal cancer resection surgery (e.g., subsequent to colon resection) in order to provide support to the structure, and to release an amount of the anti-angiogenic factor.

[0660] Within further aspects of the present invention, methods are provided for treating tumor excision sites, comprising administering a polynucleotide, polypeptide, agonist and/or agonist to the resection margins of a tumor subsequent to excision, such that the local recurrence of cancer and the formation of new blood vessels at the site is inhibited. Within one embodiment of the invention, the anti-angiogenic compound is administered directly to the tumor excision site (e.g., applied by swabbing, brushing or otherwise coating the resection margins of the tumor with the anti-angiogenic compound). Alternatively, the anti-angiogenic compounds may be incorporated into known surgical pastes prior to administration. Within particularly preferred embodiments of the invention, the anti-angiogenic compounds are applied after hepatic resections for malignancy, and after neurosurgical operations.

[0661] Within one aspect of the present invention, polynucleotides, polypeptides, agonists and/or agonists may be administered to the resection margin of a wide variety of tumors, including for example, breast, colon, brain and hepatic tumors. For example, within one embodiment of the invention, anti-angiogenic compounds may be administered to the site of a neurological tumor subsequent to excision, such that the formation of new blood vessels at the site are inhibited.

[0662] The polynucleotides, polypeptides, agonists and/or agonists of the present invention may also be administered along with other anti-angiogenic factors. Representative examples of other anti-angiogenic factors include: Anti-Invasive Factor, retinoic acid and derivatives thereof, paclitaxel, Suramin, Tissue Inhibitor of Metalloproteinase-1, Tissue Inhibitor of Metalloproteinase-2, Plasminogen Activator Inhibitor-1, Plasminogen Activator Inhibitor-2, and various forms of the lighter “d group” transition metals.

[0663] Lighter “d group” transition metals include, for example, vanadium, molybdenum, tungsten, titanium, niobium, and tantalum species. Such transition metal species may form transition metal complexes. Suitable complexes of the above-mentioned transition metal species include oxo transition metal complexes. 16261 Representative examples of vanadium complexes include oxo vanadium complexes such as vanadate and vanadyl complexes. Suitable vanadate complexes include metavanadate and orthovanadate complexes such as, for example, ammonium metavanadate, sodium metavanadate, and sodium orthovanadate. Suitable vanadyl complexes include, for example, vanadyl acetylacetonate and vanadyl sulfate including vanadyl sulfate hydrates such as vanadyl sulfate mono- and trihydrates.

[0664] Representative examples of tungsten and molybdenum complexes also include oxo complexes. Suitable oxo tungsten complexes include tungstate and tungsten oxide complexes. Suitable tungstate complexes include ammonium tungstate, calcium tungstate, sodium tungstate dihydrate, and tungstic acid. Suitable tungsten oxides include tungsten (IV) oxide and tungsten (VI) oxide. Suitable oxo molybdenum complexes include molybdate, molybdenum oxide, and molybdenyl complexes. Suitable molybdate complexes include ammonium molybdate and its hydrates, sodium molybdate and its hydrates, and potassium molybdate and its hydrates. Suitable molybdenum oxides include molybdenum (VI) oxide, molybdenum (VI) oxide, and molybdic acid. Suitable molybdenyl complexes include, for example, molybdenyl acetylacetonate. Other suitable tungsten and molybdenum complexes include hydroxo derivatives derived from, for example, glycerol, tartaric acid, and sugars.

[0665] A wide variety of other anti-angiogenic factors may also be utilized within the context of the present invention. Representative examples include platelet factor 4; protamine sulphate; sulphated chitin derivatives (prepared from queen crab shells), (Murata et al., Cancer Res. 51:22-26, 1991); Sulphated Polysaccharide Peptidoglycan Complex (SP-PG) (the function of this compound may be enhanced by the presence of steroids such as estrogen, and tamoxifen citrate); Staurosporine; modulators of matrix metabolism, including for example, proline analogs, cishydroxyproline, d,L-3,4-dehydroproline, Thiaproline, alpha,alpha-dipyridyl, aminopropionitrile fumarate; 4-propyl-5-(4-pyridinyl)-2(3H)-oxazolone; Methotrexate; Mitoxantrone; Heparin; Interferons; 2 Macroglobulin-serum; ChIMP-3 (Pavloff et al., J. Bio. Chem. 267:17321-17326, 1992); Chymostatin (Tomkinson et al., Biochem J. 286:475-480, 1992); Cyclodextrin Tetradecasulfate; Eponemycin; Camptothecin; Fumagillin (Ingber et al., Nature 348:555-557, 1990); Gold Sodium Thiomalate (“GST”; Matsubara and Ziff, J. Clin. Invest. 79:1440-1446, 1987); anticollagenase-serum; alpha2-antiplasmin (Holmes et al., J. Biol. Chem. 262(4):1659-1664, 1987); Bisantrene (National Cancer Institute); Lobenzarit disodium (N-(2)-carboxyphenyl-4-chloroanthronilic acid disodium or “CCA”; Takeuchi et al., Agents Actions 36:312-316, 1992); Thalidomide; Angostatic steroid; AGM-1470; carboxynaminolmidazole; and metalloproteinase inhibitors such as BB94.

[0666] Diseases at the Cellular Level

[0667] Diseases associated with increased cell survival or the inhibition of apoptosis that could be treated, prevented, diagnosed, and/or prognosed using polynucleotides or polypeptides, as well as antagonists or agonists of the present invention, include cancers (such as follicular lymphomas, carcinomas with p53 mutations, and hormone-dependent tumors, including, but not limited to colon cancer, cardiac tumors, pancreatic cancer, melanoma, retinoblastoma, glioblastoma, lung cancer, intestinal cancer, testicular cancer, stomach cancer, neuroblastoma, myxoma, myoma, lymphoma, endothelioma, osteoblastoma, osteoclastoma, osteosarcoma, chondrosarcoma, adenoma, breast cancer, prostate cancer, Kaposi's sarcoma and ovarian cancer); autoimmune disorders (such as, multiple sclerosis, Sjogren's syndrome, Hashimoto's thyroiditis, biliary cirrhosis, Behcet's disease, Crohn's disease, polymyositis, systemic lupus erythematosus and immune-related glomerulonephritis and rheumatoid arthritis) and viral infections (such as herpes viruses, pox viruses and adenoviruses), inflammation, graft v. host disease, acute graft rejection, and chronic graft rejection.

[0668] In preferred embodiments, polynucleotides, polypeptides, and/or antagonists of the invention are used to inhibit growth, progression, and/or metasis of cancers, in particular those listed above.

[0669] Additional diseases or conditions associated with increased cell survival that could be treated or detected by polynucleotides or polypeptides, or agonists or antagonists of the present invention include, but are not limited to, progression, and/or metastases of malignancies and related disorders such as leukemia (including acute leukemias (e.g., acute lymphocytic leukemia, acute myelocytic leukemia (including myeloblastic, promyelocytic, myelomonocytic, monocytic, and erythroleukemia)) and chronic leukemias (e.g., chronic myelocytic (granulocytic) leukemia and chronic lymphocytic leukemia)), polycythemia vera, lymphomas (e.g., Hodgkin's disease and non-Hodgkin's disease), multiple myeloma, Waldenstrom's macroglobulinemia, heavy chain disease, and solid tumors including, but not limited to, sarcomas and carcinomas such as fibrosarcoma, myxosarcoma, liposarcoma, chondrosarcoma, osteogenic sarcoma, chordoma, angiosarcoma, endotheliosarcoma, lymphangiosarcoma, lymphangioendotheliosarcoma, synovioma, mesothelioma, Ewing's tumor, leiomyosarcoma, rhabdomyosarcoma, colon carcinoma, pancreatic cancer, breast cancer, ovarian cancer, prostate cancer, squamous cell carcinoma, basal cell carcinoma, adenocarcinoma, sweat gland carcinoma, sebaceous gland carcinoma, papillary carcinoma, papillary adenocarcinomas, cystadenocarcinoma, medullary carcinoma, bronchogenic carcinoma, renal cell carcinoma, hepatoma, bile duct carcinoma, choriocarcinoma, seminoma, embryonal carcinoma, Wilm's tumor, cervical cancer, testicular tumor, lung carcinoma, small cell lung carcinoma, bladder carcinoma, epithelial carcinoma, glioma, astrocytoma, medulloblastoma, craniopharyngioma, ependymoma, pinealoma, hemangioblastoma, acoustic neuroma, oligodendroglioma, menangioma, melanoma, neuroblastoma, and retinoblastoma.

[0670] Diseases associated with increased apoptosis that could be treated, prevented, diagnosed, and/or prognesed using polynucleotides or polypeptides, as well as agonists or antagonists of the present invention, include, but are not limited to, AIDS; neurodegenerative disorders (such as Alzheimer's disease, Parkinson's disease, Amyotrophic lateral sclerosis, Retinitis pigmentosa, Cerebellar degeneration and brain tumor or prior associated disease); autoimmune disorders (such as, multiple sclerosis, Sjogren's syndrome, Hashimoto's thyroiditis, biliary cirrhosis, Behcet's disease, Crohn's disease, polymyositis, systemic lupus erythematosus and immune-related glomerulonephritis and rheumatoid arthritis) myelodysplastic syndromes (such as aplastic anemia), graft v. host disease, ischemic injury (such as that caused by myocardial infarction, stroke and reperfusion injury), liver injury (e.g., hepatitis related liver injury, ischemia/reperfusion injury, cholestosis (bile duct injury) and liver cancer); toxin-induced liver disease (such as that caused by alcohol), septic shock, cachexia and anorexia.

[0671] Wound Healing and Epithelial Cell Proliferation

[0672] In accordance with yet a further aspect of the present invention, there is provided a process for utilizing polynucleotides or polypeptides, as well as agonists or antagonists of the present invention, for therapeutic purposes, for example, to stimulate epithelial cell proliferation and basal keratinocytes for the purpose of wound healing, and to stimulate hair follicle production and healing of dermal wounds. Polynucleotides or polypeptides, as well as agonists or antagonists of the present invention, may be clinically useful in stimulating wound healing including surgical wounds, excisional wounds, deep wounds involving damage of the dermis and epidermis, eye tissue wounds, dental tissue wounds, oral cavity wounds, diabetic ulcers, dermal ulcers, cubitus ulcers, arterial ulcers, venous stasis ulcers, burns resulting from heat exposure or chemicals, and other abnormal wound healing conditions such as uremia, malnutrition, vitamin deficiencies and complications associated with systemic treatment with steroids, radiation therapy and antineoplastic drugs and antimetabolites. Polynucleotides or polypeptides, as well as agonists or antagonists of the present invention, could be used to promote dermal reestablishment subsequent to dermal loss.

[0673] Polynucleotides or polypeptides, as well as agonists or antagonists of the present invention, could be used to increase the adherence of skin grafts to a wound bed and to stimulate re-epithelialization from the wound bed. The following are types of grafts that polynucleotides or polypeptides, agonists or antagonists of the present invention, could be used to increase adherence to a wound bed: autografts, artificial skin, allografts, autodermic graft, autoepdermic grafts, avacular grafts, Blair-Brown grafts, bone graft, brephoplastic grafts, cutis graft, delayed graft, dermic graft, epidermic graft, fascia graft, full thickness graft, heterologous graft, xenograft, homologous graft, hyperplastic graft, lamellar graft, mesh graft, mucosal graft, Ollier-Thiersch graft, omenpal graft, patch graft, pedicle graft, penetrating graft, split skin graft, thick split graft. Polynucleotides or polypeptides, as well as agonists or antagonists of the present invention, can be used to promote skin strength and to improve the appearance of aged skin.

[0674] It is believed that polynucleotides or polypeptides, as well as agonists or antagonists of the present invention, will also produce changes in hepatocyte proliferation, and epithelial cell proliferation in the lung, breast, pancreas, stomach, small intestine, and large intestine. Polynucleotides or polypeptides, as well as agonists or antagonists of the present invention, could promote proliferation of epithelial cells such as sebocytes, hair follicles, hepatocytes, type II pneumocytes, mucin-producing goblet cells, and other epithelial cells and their progenitors contained within the skin, lung, liver, and gastrointestinal tract. Polynucleotides or polypeptides, agonists or antagonists of the present invention, may promote proliferation of endothelial cells, keratinocytes, and basal keratinocytes.

[0675] Polynucleotides or polypeptides, as well as agonists or antagonists of the present invention, could also be used to reduce the side effects of gut toxicity that result from radiation, chemotherapy treatments or viral infections. Polynucleotides or polypeptides, as well as agonists or antagonists of the present invention, may have a cytoprotective effect on the small intestine mucosa. Polynucleotides or polypeptides, as well as agonists or antagonists of the present invention, may also stimulate healing of mucositis (mouth ulcers) that result from chemotherapy and viral infections.

[0676] Polynucleotides or polypeptides, as well as agonists or antagonists of the present invention, could further be used in full regeneration of skin in full and partial thickness skin defects, including burns, (i.e., repopulation of hair follicles, sweat glands, and sebaceous glands), treatment of other skin defects such as psoriasis. Polynucleotides or polypeptides, as well as agonists or antagonists of the present invention, could be used to treat epidermolysis bullosa, a defect in adherence of the epidermis to the underlying dermis which results in frequent, open and painful blisters by accelerating reepithelialization of these lesions. Polynucleotides or polypeptides, as well as agonists or antagonists of the present invention, could also be used to treat gastric and doudenal ulcers and help heal by scar formation of the mucosal lining and regeneration of glandular mucosa and duodenal mucosal lining more rapidly. Inflammatory bowel diseases, such as Crohn's disease and ulcerative colitis, are diseases which result in destruction of the mucosal surface of the small or large intestine, respectively. Thus, polynucleotides or polypeptides, as well as agonists or antagonists of the present invention, could be used to promote the resurfacing of the mucosal surface to aid more rapid healing and to prevent progression of inflammatory bowel disease. Treatment with polynucleotides or polypeptides, agonists or antagonists of the present invention, is expected to have a significant effect on the production of mucus throughout the gastrointestinal tract and could be used to protect the intestinal mucosa from injurious substances that are ingested or following surgery. Polynucleotides or polypeptides, as well as agonists or antagonists of the present invention, could be used to treat diseases associate with the under expression.

[0677] Moreover, polynucleotides or polypeptides, as well as agonists or antagonists of the present invention, could be used to prevent and heal damage to the lungs due to various pathological states. Polynucleotides or polypeptides, as well as agonists or antagonists of the present invention, which could stimulate proliferation and differentiation and promote the repair of alveoli and brochiolar epithelium to prevent or treat acute or chronic lung damage. For example, emphysema, which results in the progressive loss of aveoli, and inhalation injuries, i.e., resulting from smoke inhalation and burns, that cause necrosis of the bronchiolar epithelium and alveoli could be effectively treated using polynucleotides or polypeptides, agonists or antagonists of the present invention. Also, polynucleotides or polypeptides, as well as agonists or antagonists of the present invention, could be used to stimulate the proliferation of and differentiation of type II pneumocytes, which may help treat or prevent disease such as hyaline membrane diseases, such as infant respiratory distress syndrome and bronchopulmonary displasia, in premature infants.

[0678] Polynucleotides or polypeptides, as well as agonists or antagonists of the present invention, could stimulate the proliferation and differentiation of hepatocytes and, thus, could be used to alleviate or treat liver diseases and pathologies such as fulminant liver failure caused by cirrhosis, liver damage caused by viral hepatitis and toxic substances (i.e., acetaminophen, carbon tetraholoride and other hepatotoxins known in the art).

[0679] In addition, polynucleotides or polypeptides, as well as agonists or antagonists of the present invention, could be used treat or prevent the onset of diabetes mellitus. In patients with newly diagnosed Types I and II diabetes, where some islet cell function remains, polynucleotides or polypeptides, as well as agonists or antagonists of the present invention, could be used to maintain the islet function so as to alleviate, delay or prevent permanent manifestation of the disease. Also, polynucleotides or polypeptides, as well as agonists or antagonists of the present invention, could be used as an auxiliary in islet cell transplantation to improve or promote islet cell function.

[0680] Neural Activitv and Neurological Diseases

[0681] The polynucleotides, polypeptides and agonists or antagonists of the invention may be used for the diagnosis and/or treatment of diseases, disorders, damage or injury of the brain and/or nervous system. Nervous system disorders that can be treated with the compositions of the invention (e.g., polypeptides, polynucleotides, and/or agonists or antagonists), include, but are not limited to, nervous system injuries, and diseases or disorders which result in either a disconnection of axons, a diminution or degeneration of neurons, or demyelination. Nervous system lesions which may be treated in a patient (including human and non-human mammalian patients) according to the methods of the invention, include but are not limited to, the following lesions of either the central (including spinal cord, brain) or peripheral nervous systems: (1) ischemic lesions, in which a lack of oxygen in a portion of the nervous system results in neuronal injury or death, including cerebral infarction or ischemia, or spinal cord infarction or ischemia; (2) traumatic lesions, including lesions caused by physical injury or associated with surgery, for example, lesions which sever a portion of the nervous system, or compression injuries; (3) malignant lesions, in which a portion of the nervous system is destroyed or injured by malignant tissue which is either a nervous system associated malignancy or a malignancy derived from non-nervous system tissue; (4) infectious lesions, in which a portion of the nervous system is destroyed or injured as a result of infection, for example, by an abscess or associated with infection by human immunodeficiency virus, herpes zoster, or herpes simplex virus or with Lyme disease, tuberculosis, or syphilis; (5) degenerative lesions, in which a portion of the nervous system is destroyed or injured as a result of a degenerative process including but not limited to, degeneration associated with Parkinson's disease, Alzheimer's disease, Huntington's chorea, or amyotrophic lateral sclerosis (ALS); (6) lesions associated with nutritional diseases or disorders, in which a portion of the nervous system is destroyed or injured by a nutritional disorder or disorder of metabolism including, but not limited to, vitamin B12 deficiency, folic acid deficiency, Wemicke disease, tobacco-alcohol amblyopia, Marchiafava-Bignami disease (primary degeneration of the corpus callosum), and alcoholic cerebellar degeneration; (7) neurological lesions associated with systemic diseases including, but not limited to, diabetes (diabetic neuropathy, Bell's palsy), systemic lupus erythematosus, carcinoma, or sarcoidosis; (8) lesions caused by toxic substances including alcohol, lead, or particular neurotoxins; and (9) demyelinated lesions in which a portion of the nervous system is destroyed or injured by a demyelinating disease including, but not limited to, multiple sclerosis, human immunodeficiency virus-associated myelopathy, transverse myelopathy or various etiologies, progressive multifocal leukoencephalopathy, and central pontine myelinolysis.

[0682] In one embodiment, the polypeptides, polynucleotides, or agonists or antagonists of the invention are used to protect neural cells from the damaging effects of hypoxia. In a further preferred embodiment, the polypeptides, polynucleotides, or agonists or antagonists of the invention are used to protect neural cells from the damaging effects of cerebral hypoxia. According to this embodiment, the compositions of the invention are used to treat or prevent neural cell injury associated with cerebral hypoxia. In one non-exclusive aspect of this embodiment, the polypeptides, polynucleotides, or agonists or antagonists of the invention, are used to treat or prevent neural cell injury associated with cerebral ischemia. In another non-exclusive aspect of this embodiment, the polypeptides, polynucleotides, or agonists or antagonists of the invention are used to treat or prevent neural cell injury associated with cerebral infarction.

[0683] In another preferred embodiment, the polypeptides, polynucleotides, or agonists or antagonists of the invention are used to treat or prevent neural cell injury associated with a stroke. In a specific embodiment, the polypeptides, polynucleotides, or agonists or antagonists of the invention are used to treat or prevent cerebral neural cell injury associated with a stroke.

[0684] In another preferred embodiment, the polypeptides, polynucleotides, or agonists or antagonists of the invention are used to treat or prevent neural cell injury associated with a heart attack. In a specific embodiment, the polypeptides, polynucleotides, or agonists or antagonists of the invention are used to treat or prevent cerebral neural cell injury associated with a heart attack.

[0685] The compositions of the invention which are useful for treating or preventing a nervous system disorder may be selected by testing for biological activity in promoting the survival or differentiation of neurons. For example, and not by way of limitation, compositions of the invention which elicit any of the following effects may be useful according to the invention: (1) increased survival time of neurons in culture either in the presence or absence of hypoxia or hypoxic conditions; (2) increased sprouting of neurons in culture or in vivo; (3) increased production of a neuron-associated molecule in culture or in vivo, e.g., choline acetyltransferase or acetylcholinesterase with respect to motor neurons; or (4) decreased symptoms of neuron dysfunction in vivo. Such effects may be measured by any method known in the art. In preferred, non-limiting embodiments, increased survival of neurons may routinely be measured using a method set forth herein or otherwise known in the art, such as, for example, in Zhang et al., Proc Natl Acad Sci USA 97:3637-42 (2000) or in Arakawa et al., J. Neurosci., 10:3507-15 (1990); increased sprouting of neurons may be detected by methods known in the art, such as, for example, the methods set forth in Pestronk et al., Exp. Neurol., 70:65-82 (1980), or Brown et al., Ann. Rev. Neurosci., 4:17-42 (1981); increased production of neuron-associated molecules may be measured by bioassay, enzymatic assay, antibody binding, Northern blot assay, etc., using techniques known in the art and depending on the molecule to be measured; and motor neuron dysfunction may be measured by assessing the physical manifestation of motor neuron disorder, e.g., weakness, motor neuron conduction velocity, or functional disability.

[0686] In specific embodiments, motor neuron disorders that may be treated according to the invention include, but are not limited to, disorders such as infarction, infection, exposure to toxin, trauma, surgical damage, degenerative disease or malignancy that may affect motor neurons as well as other components of the nervous system, as well as disorders that selectively affect neurons such as amyotrophic lateral sclerosis, and including, but not limited to, progressive spinal muscular atrophy, progressive bulbar palsy, primary lateral sclerosis, infantile and juvenile muscular atrophy, progressive bulbar paralysis of childhood (Fazio-Londe syndrome), poliomyelitis and the post polio syndrome, and Hereditary Motorsensory Neuropathy (Charcot-Marie-Tooth Disease).

[0687] Further, polypeptides or polynucleotides of the invention may play a role in neuronal survival; synapse formation; conductance; neural differentiation, etc. Thus, compositions of the invention (including polynucleotides, polypeptides, and agonists or antagonists) may be used to diagnose and/or treat or prevent diseases or disorders associated with these roles, including, but not limited to, learning and/or cognition disorders. The compositions of the invention may also be useful in the treatment or prevention of neurodegenerative disease states and/or behavioural disorders. Such neurodegenerative disease states and/or behavioral disorders include, but are not limited to, Alzheimer's Disease, Parkinson's Disease, Huntington's Disease, Tourette Syndrome, schizophrenia, mania, dementia, paranoia, obsessive compulsive disorder, panic disorder, learning disabilities, ALS, psychoses, autism, and altered behaviors, including disorders in feeding, sleep patterns, balance, and perception. In addition, compositions of the invention may also play a role in the treatment, prevention and/or detection of developmental disorders associated with the developing embryo, or sexually-linked disorders.

[0688] Additionally, polypeptides, polynucleotides and/or agonists or antagonists of the invention, may be useful in protecting neural cells from diseases, damage, disorders, or injury, associated with cerebrovascular disorders including, but not limited to, carotid artery diseases (e.g., carotid artery thrombosis, carotid stenosis, or Moyamoya Disease), cerebral amyloid angiopathy, cerebral aneurysm, cerebral anoxia, cerebral arteriosclerosis, cerebral arteriovenous malformations, cerebral artery diseases, cerebral embolism and thrombosis (e.g., carotid artery thrombosis, sinus thrombosis, or Wallenberg's Syndrome), cerebral hemorrhage (e.g., epidural or subdural hematoma, or subarachnoid hemorrhage), cerebral infarction, cerebral ischemia (e.g., transient cerebral ischemia, Subclavian Steal Syndrome, or vertebrobasilar insufficiency), vascular dementia (e.g., multi-infarct), leukomalacia, periventricular, and vascular headache (e.g., cluster headache or migraines).

[0689] In accordance with yet a further aspect of the present invention, there is provided a process for utilizing polynucleotides or polypeptides, as well as agonists or antagonists of the present invention, for therapeutic purposes, for example, to stimulate neurological cell proliferation and/or differentiation. Therefore, polynucleotides, polypeptides, agonists and/or antagonists of the invention may be used to treat and/or detect neurologic diseases. Moreover, polynucleotides or polypeptides, or agonists or antagonists of the invention, can be used as a marker or detector of a particular nervous system disease or disorder.

[0690] Examples of neurologic diseases which can be treated or detected with polynucleotides, polypeptides, agonists, and/or antagonists of the present invention include brain diseases, such as metabolic brain diseases which includes phenylketonuria such as maternal phenylketonuria, pyruvate carboxylase deficiency, pyruvate dehydrogenase complex deficiency, Wernicke's Encephalopathy, brain edema, brain neoplasms such as cerebellar neoplasms which include infratentorial neoplasms, cerebral ventricle neoplasms such as choroid plexus neoplasms, hypothalamic neoplasms, supratentorial neoplasms, canavan disease, cerebellar diseases such as cerebellar ataxia which include spinocerebellar degeneration such as ataxia telangiectasia, cerebellar dyssynergia, Friederich's Ataxia, Machado-Joseph Disease, olivopontocerebellar atrophy, cerebellar neoplasms such as infratentorial neoplasms, diffuse cerebral sclerosis such as encephalitis periaxialis, globoid cell leukodystrophy, metachromatic leukodystrophy and subacute sclerosing panencephalitis.

[0691] Additional neurologic diseases which can be treated or detected with polynucleotides, polypeptides, agonists, and/or antagonists of the present invention include cerebrovascular disorders (such as carotid artery diseases which include carotid artery thrombosis, carotid stenosis and Moyamoya Disease), cerebral amyloid angiopathy, cerebral aneurysm, cerebral anoxia, cerebral arteriosclerosis, cerebral arteriovenous malformations, cerebral artery diseases, cerebral embolism and thrombosis such as carotid artery thrombosis, sinus thrombosis and Wallenberg's Syndrome, cerebral hemorrhage such as epidural hematoma, subdural hematoma and subarachnoid hemorrhage, cerebral infarction, cerebral ischemia such as transient cerebral ischemia, Subclavian Steal Syndrome and vertebrobasilar insufficiency, vascular dementia such as multi-infarct dementia, periventricular leukomalacia, vascular headache such as cluster headache and migraine.

[0692] Additional neurologic diseases which can be treated or detected with polynucleotides, polypeptides, agonists, and/or antagonists of the present invention include dementia such as AIDS Dementia Complex, presenile dementia such as Alzheimer's Disease and Creutzfeldt-Jakob Syndrome, senile dementia such as Alzheimer's Disease and progressive supranuclear palsy, vascular dementia such as multi-infarct dementia, encephalitis which include encephalitis periaxialis, viral encephalitis such as epidemic encephalitis, Japanese Encephalitis, St. Louis Encephalitis, tick-borne encephalitis and West Nile Fever, acute disseminated encephalomyelitis, meningoencephalitis such as uveomeningoencephalitic syndrome, Postencephalitic Parkinson Disease and subacute sclerosing panencephalitis, encephalomalacia such as periventricular leukomalacia, epilepsy such as generalized epilepsy which includes infantile spasms, absence epilepsy, myoclonic epilepsy which includes MERRF Syndrome, tonic-clonic epilepsy, partial epilepsy such as complex partial epilepsy, frontal lobe epilepsy and temporal lobe epilepsy, post-traumatic epilepsy, status epilepticus such as Epilepsia Partialis Continua, and Hallervorden-Spatz Syndrome.

[0693] Additional neurologic diseases which can be treated or detected with polynucleotides, polypeptides, agonists, and/or antagonists of the present invention include hydrocephalus such as Dandy-Walker Syndrome and normal pressure hydrocephalus, hypothalamic diseases such as hypothalamic neoplasms, cerebral malaria, narcolepsy which includes cataplexy, bulbar poliomyelitis, cerebri pseudotumor, Rett Syndrome, Reye's Syndrome, thalamic diseases, cerebral toxoplasmosis, intracranial tuberculoma and Zellweger Syndrome, central nervous system infections such as AIDS Dementia Complex, Brain Abscess, subdural empyema, encephalomyelitis such as Equine Encephalomyelitis, Venezuelan Equine Encephalomyelitis, Necrotizing Hemorrhagic Encephalomyelitis, Visna, and cerebral malaria.

[0694] Additional neurologic diseases which can be treated or detected with polynucleotides, polypeptides, agonists, and/or antagonists of the present invention include meningitis such as arachnoiditis, aseptic meningtitis such as viral meningtitis which includes lymphocytic choriomeningitis, Bacterial meningtitis which includes Haemophilus Meningtitis, Listeria Meningtitis, Meningococcal Meningtitis such as Waterhouse-Friderichsen Syndrome, Pneumococcal Meningtitis and meningeal tuberculosis, fungal meningitis such as Cryptococcal Meningtitis, subdural effusion, meningoencephalitis such as uvemeningoencephalitic syndrome, myelitis such as transverse myelitis, neurosyphilis such as tabes dorsalis, poliomyelitis which includes bulbar poliomyelitis and postpoliomyelitis syndrome, prion diseases (such as Creutzfeldt-Jakob Syndrome, Bovine Spongiform Encephalopathy, Gerstmann-Straussler Syndrome, Kuru, Scrapie), and cerebral toxoplasmosis.

[0695] Additional neurologic diseases which can be treated or detected with polynucleotides, polypeptides, agonists, and/or antagonists of the present invention include central nervous system neoplasms such as brain neoplasms that include cerebellar neoplasms such as infratentorial neoplasms, cerebral ventricle neoplasms such as choroid plexus neoplasms, hypothalamic neoplasms and supratentorial neoplasms, meningeal neoplasms, spinal cord neoplasms which include epidural neoplasms, demyelinating diseases such as Canavan Diseases, diffuse cerebral sceloris which includes adrenoleukodystrophy, encephalitis periaxialis, globoid cell leukodystrophy, diffuse cerebral sclerosis such as metachromatic leukodystrophy, allergic encephalomyelitis, necrotizing hemorrhagic encephalomyelitis, progressive multifocal leukoencephalopathy, multiple sclerosis, central pontine myelinolysis, transverse myelitis, neuromyelitis optica, Scrapie, Swayback, Chronic Fatigue Syndrome, Visna, High Pressure Nervous Syndrome, Meningism, spinal cord diseases such as amyotonia congenita, amyotrophic lateral sclerosis, spinal muscular atrophy such as Werdnig-Hoffmann Disease, spinal cord compression, spinal cord neoplasms such as epidural neoplasms, syringomyelia, Tabes Dorsalis, Stiff-Man Syndrome, mental retardation such as Angelman Syndrome, Cri-du-Chat Syndrome, De Lange's Syndrome, Down Syndrome, Gangliosidoses such as gangliosidoses G(M1), Sandhoff Disease, Tay-Sachs Disease, Hartnup Disease, homocystinuria, Laurence-Moon- Biedl Syndrome, Lesch-Nyhan Syndrome, Maple Syrup Urine Disease, mucolipidosis such as fucosidosis, neuronal ceroid-lipofuscinosis, oculocerebrorenal syndrome, phenylketonuria such as maternal phenylketonuria, Prader-Willi Syndrome, Rett Syndrome, Rubinstein-Taybi Syndrome, Tuberous Sclerosis, WAGR Syndrome, nervous system abnormalities such as holoprosencephaly, neural tube defects such as anencephaly which includes hydrangencephaly, Arnold-Chairi Deformity, encephalocele, meningocele, meningomyelocele, spinal dysraphism such as spina bifida cystica and spina bifida occulta.

[0696] Additional neurologic diseases which can be treated or detected with polynucleotides, polypeptides, agonists, and/or antagonists of the present invention include hereditary motor and sensory neuropathies which include Charcot-Marie Disease, Hereditary optic atrophy, Refsum's Disease, hereditary spastic paraplegia, Werdnig-Hoffmann Disease, Hereditary Sensory and Autonomic Neuropathies such as Congenital Analgesia and Familial Dysautonomia, Neurologic manifestations (such as agnosia that include Gerstmann's Syndrome, Amnesia such as retrograde amnesia, apraxia, neurogenic bladder, cataplexy, communicative disorders such as hearing disorders that includes deafness, partial hearing loss, loudness recruitment and tinnitus, language disorders such as aphasia which include agraphia, anomia, broca aphasia, and Wemicke Aphasia, Dyslexia such as Acquired Dyslexia, language development disorders, speech disorders such as aphasia which includes anomia, broca aphasia and Wernicke Aphasia, articulation disorders, communicative disorders such as speech disorders which include dysarthria, echolalia, mutism and stuttering, voice disorders such as aphonia and hoarseness, decerebrate state, delirium, fasciculation, hallucinations, meningism, movement disorders such as angelman syndrome, ataxia, athetosis, chorea, dystonia, hypokinesia, muscle hypotonia, myoclonus, tic, torticollis and tremor, muscle hypertonia such as muscle rigidity such as stiff-man syndrome, muscle spasticity, paralysis such as facial paralysis which includes Herpes Zoster Oticus, Gastroparesis, Hemiplegia, ophthalmoplegia such as diplopia, Duane's Syndrome, Homer's Syndrome, Chronic progressive external ophthalmoplegia such as Kearns Syndrome, Bulbar Paralysis, Tropical Spastic Paraparesis, Paraplegia such as Brown-Sequard Syndrome, quadriplegia, respiratory paralysis and vocal cord paralysis, paresis, phantom limb, taste disorders such as ageusia and dysgeusia, vision disorders such as amblyopia, blindness, color vision defects, diplopia, hemianopsia, scotoma and subnormal vision, sleep disorders such as hypersomnia which includes Kleine-Levin Syndrome, insomnia, and somnambulism, spasm such as trismus, unconsciousness such as coma, persistent vegetative state and syncope and vertigo, neuromuscular diseases such as amyotonia congenita, amyotrophic lateral sclerosis, Lambert-Eaton Myasthenic Syndrome, motor neuron disease, muscular atrophy such as spinal muscular atrophy, Charcot-Marie Disease and Werdnig-Hoffmann Disease, Postpoliomyelitis Syndrome, Muscular Dystrophy, Myasthenia Gravis, Myotonia Atrophica, Myotonia Confenita, Nemaline Myopathy, Familial Periodic Paralysis, Multiplex Paramyloclonus, Tropical Spastic Paraparesis and Stiff-Man Syndrome, peripheral nervous system diseases such as acrodynia, amyloid neuropathies, autonomic nervous system diseases such as Adie's Syndrome, Barre-Lieou Syndrome, Familial Dysautonomia, Horner's Syndrome, Reflex Sympathetic Dystrophy and Shy-Drager Syndrome, Cranial Nerve Diseases such as Acoustic Nerve Diseases such as Acoustic Neuroma which includes Neurofibromatosis 2, Facial Nerve Diseases such as Facial Neuralgia,Melkersson-Rosenthal Syndrome, ocular motility disorders which includes amblyopia, nystagmus, oculomotor nerve paralysis, ophthalmoplegia such as Duane's Syndrome, Horner's Syndrome, Chronic Progressive External Ophthalmoplegia which includes Kearns Syndrome, Strabismus such as Esotropia and Exotropia, Oculomotor Nerve Paralysis, Optic Nerve Diseases such as Optic Atrophy which includes Hereditary Optic Atrophy, Optic Disk Drusen, Optic Neuritis such as Neuromyelitis Optica, Papilledema, Trigeminal Neuralgia, Vocal Cord Paralysis, Demyelinating Diseases such as Neuromyelitis Optica and Swayback, and Diabetic neuropathies such as diabetic foot.

[0697] Additional neurologic diseases which can be treated or detected with polynucleotides, polypeptides, agonists, and/or antagonists of the present invention include nerve compression syndromes such as carpal tunnel syndrome, tarsal tunnel syndrome, thoracic outlet syndrome such as cervical rib syndrome, ulnar nerve compression syndrome, neuralgia such as causalgia, cervico-brachial neuralgia, facial neuralgia and trigeminal neuralgia, neuritis such as experimental allergic neuritis, optic neuritis, polyneuritis, polyradiculoneuritis and radiculities such as polyradiculitis, hereditary motor and sensory neuropathies such as Charcot-Marie Disease, Hereditary Optic Atrophy, Refsum's Disease, Hereditary Spastic Paraplegia and Werdnig-Hoffmann Disease, Hereditary Sensory and Autonomic Neuropathies which include Congenital Analgesia and Familial Dysautonomia, POEMS Syndrome, Sciatica, Gustatory Sweating and Tetany).

[0698] Endocrine Disorders

[0699] Polynucleotides or polypeptides, or agonists or antagonists of the present invention, may be used to treat, prevent, diagnose, and/or prognose disorders and/or diseases related to hormone imbalance, and/or disorders or diseases of the endocrine system.

[0700] Hormones secreted by the glands of the endocrine system control physical growth, sexual function, metabolism, and other functions. Disorders may be classified in two ways: disturbances in the production of hormones, and the inability of tissues to respond to hormones. The etiology of these hormone imbalance or endocrine system diseases, disorders or conditions may be genetic, somatic, such as cancer and some autoimmune diseases, acquired (e.g., by chemotherapy, injury or toxins), or infectious. Moreover, polynucleotides, polypeptides, antibodies, and/or agonists or antagonists of the present invention can be used as a marker or detector of a particular disease or disorder related to the endocrine system and/or hormone imbalance.

[0701] Endocrine system and/or hormone imbalance and/or diseases encompass disorders of uterine motility including, but not limited to: complications with pregnancy and labor (e.g., pre-term labor, post-term pregnancy, spontaneous abortion, and slow or stopped labor); and disorders and/or diseases of the menstrual cycle (e.g., dysmenorrhea and endometriosis).

[0702] Endocrine system and/or hormone imbalance disorders and/or diseases include disorders and/or diseases of the pancreas, such as, for example, diabetes mellitus, diabetes insipidus, congenital pancreatic agenesis, pheochromocytoma—islet cell tumor syndrome; disorders and/or diseases of the adrenal glands such as, for example, Addison's Disease, corticosteroid deficiency, virilizing disease, hirsutism, Cushing's Syndrome, hyperaldosteronism, pheochromocytoma; disorders and/or diseases of the pituitary gland, such as, for example, hyperpituitarism, hypopituitarism, pituitary dwarfism, pituitary adenoma, panhypopituitarism, acromegaly, gigantism; disorders and/or diseases of the thyroid, including but not limited to, hyperthyroidism, hypothyroidism, Plummer's disease, Graves' disease (toxic diffuse goiter), toxic nodular goiter, thyroiditis (Hashimoto's thyroiditis, subacute granulomatous thyroiditis, and silent lymphocytic thyroiditis), Pendred's syndrome, myxedema, cretinism, thyrotoxicosis, thyroid hormone coupling defect, thymic aplasia, Hurthle cell tumours of the thyroid, thyroid cancer, thyroid carcinoma, Medullary thyroid carcinoma; disorders and/or diseases of the parathyroid, such as, for example, hyperparathyroidism, hypoparathyroidism; disorders and/or diseases of the hypothalamus.

[0703] In addition, endocrine system and/or hormone imbalance disorders and/or diseases may also include disorders and/or diseases of the testes or ovaries, including cancer. Other disorders and/or diseases of the testes or ovaries further include, for example, ovarian cancer, polycystic ovary syndrome, Klinefelter's syndrome, vanishing testes syndrome (bilateral anorchia), congenital absence of Leydig's cells, cryptorchidism, Noonan's syndrome, myotonic dystrophy, capillary haemangioma of the testis (benign), neoplasias of the testis and neo-testis.

[0704] Moreover, endocrine system and/or hormone imbalance disorders and/or diseases may also include disorders and/or diseases such as, for example, polyglandular deficiency syndromes, pheochromocytoma, neuroblastoma, multiple Endocrine neoplasia, and disorders and/or cancers of endocrine tissues.

[0705] In another embodiment, a polypeptide of the invention, or polynucleotides, antibodies, agonists, or antagonists corresponding to that polypeptide, may be used to diagnose, prognose, prevent, and/or treat endocrine diseases and/or disorders associated with the tissue(s) in which the polypeptide of the invention is expressed, including one, two, three, four, five, or more tissues disclosed in Table 1A, column 8 (Tissue Distribution Library Code).

[0706] Reproductive System Disorders

[0707] The polynucleotides or polypeptides, or agonists or antagonists of the invention may be used for the diagnosis, treatment, or prevention of diseases and/or disorders of the reproductive system. Reproductive system disorders that can be treated by the compositions of the invention, include, but are not limited to, reproductive system injuries, infections, neoplastic disorders, congenital defects, and diseases or disorders which result in infertility, complications with pregnancy, labor, or parturition, and postpartum difficulties.

[0708] Reproductive system disorders and/or diseases include diseases and/or disorders of the testes, including testicular atrophy, testicular feminization, cryptorchism (unilateral and bilateral), anorchia, ectopic testis, epididymitis and orchitis (typically resulting from infections such as, for example, gonorrhea, mumps, tuberculosis, and syphilis), testicular torsion, vasitis nodosa, germ cell tumors (e.g., seminomas, embryonal cell carcinomas, teratocarcinomas, choriocarcinomas, yolk sac tumors, and teratomas), stromal tumors (e.g., Leydig cell tumors), hydrocele, hematocele, varicocele, spermatocele, inguinal hernia, and disorders of sperm production (e.g., immotile cilia syndrome, aspermia, asthenozoospermia, azoospermia, oligospermia, and teratozoospermia).

[0709] Reproductive system disorders also include disorders of the prostate gland, such as acute non-bacterial prostatitis, chronic non-bacterial prostatitis, acute bacterial prostatitis, chronic bacterial prostatitis, prostatodystonia, prostatosis, granulomatous prostatitis, malacoplakia, benign prostatic hypertrophy or hyperplasia, and prostate neoplastic disorders, including adenocarcinomas, transitional cell carcinomas, ductal carcinomas, and squamous cell carcinomas.

[0710] Additionally, the compositions of the invention may be useful in the diagnosis, treatment, and/or prevention of disorders or diseases of the penis and urethra, including inflammatory disorders, such as balanoposthitis, balanitis xerotica obliterans, phimosis, paraphimosis, syphilis, herpes simplex virus, gonorrhea, non-gonococcal urethritis, chlamydia, mycoplasma, trichomonas, HIV, AIDS, Reiter's syndrome, condyloma acuminatum, condyloma latum, and pearly penile papules; urethral abnormalities, such as hypospadias, epispadias, and phimosis; premalignant lesions, including Erythroplasia of Queyrat, Bowen's disease, Bowenoid paplosis, giant condyloma of Buscke-Lowenstein, and varrucous carcinoma; penile cancers, including squamous cell carcinomas, carcinoma in situ, verrucous carcinoma, and disseminated penile carcinoma; urethral neoplastic disorders, including penile urethral carcinoma, bulbomembranous urethral carcinoma, and prostatic urethral carcinoma; and erectile disorders, such as priapism, Peyronie's disease, erectile dysfunction, and impotence.

[0711] Moreover, diseases and/or disorders of the vas deferens include vasculititis and CBAVD (congenital bilateral absence of the vas deferens); additionally, the polynucleotides, polypeptides, and agonists or antagonists of the present invention may be used in the diagnosis, treatment, and/or prevention of diseases and/or disorders of the seminal vesicles, including hydatid disease, congenital chloride diarrhea, and polycystic kidney disease.

[0712] Other disorders and/or diseases of the male reproductive system include, for example, Klinefelter's syndrome, Young's syndrome, premature ejaculation, diabetes mellitus, cystic fibrosis, Kartagener's syndrome, high fever, multiple sclerosis, and gynecomastia.

[0713] Further, the polynucleotides, polypeptides, and agonists or antagonists of the present invention may be used in the diagnosis, treatment, and/or prevention of diseases and/or disorders of the vagina and vulva, including bacterial vaginosis, candida vaginitis, herpes simplex virus, chancroid, granuloma inguinale, lymphogranuloma venereum, scabies, human papillomavirus, vaginal trauma, vulvar trauma, adenosis, chlamydia vaginitis, gonorrhea, trichomonas vaginitis, condyloma acuminatum, syphilis, molluscum contagiosum, atrophic vaginitis, Paget's disease, lichen sclerosus, lichen planus, vulvodynia, toxic shock syndrome, vaginismus, vulvovaginitis, vulvar vestibulitis, and neoplastic disorders, such as squamous cell hyperplasia, clear cell carcinoma, basal cell carcinoma, melanomas, cancer of Bartholin's gland, and vulvar intraepithelial neoplasia.

[0714] Disorders and/or diseases of the uterus include dysmenorrhea, retroverted uterus, endometriosis, fibroids, adenomyosis, anovulatory bleeding, amenorrhea, Cushing's syndrome, hydatidiform moles, Asherman's syndrome, premature menopause, precocious puberty, uterine polyps, dysfunctional uterine bleeding (e.g., due to aberrant hormonal signals), and neoplastic disorders, such as adenocarcinomas, keiomyosarcomas, and sarcomas. Additionally, the polypeptides, polynucleotides, or agonists or antagonists of the invention may be useful as a marker or detector of, as well as in the diagnosis, treatment, and/or prevention of congenital uterine abnormalities, such as bicornuate uterus, septate uterus, simple unicornuate uterus, unicornuate uterus with a noncavitary rudimentary horn, unicornuate uterus with a non-communicating cavitary rudimentary horn, unicornuate uterus with a communicating cavitary horn, arcuate uterus, uterine didelfus, and T-shaped uterus.

[0715] Ovarian diseases and/or disorders include anovulation, polycystic ovary syndrome (Stein-Leventhal syndrome), ovarian cysts, ovarian hypofunction, ovarian insensitivity to gonadotropins, ovarian overproduction of androgens, right ovarian vein syndrome, amenorrhea, hirutism, and ovarian cancer (including, but not limited to, primary and secondary cancerous growth, Sertoli-Leydig tumors, endometriod carcinoma of the ovary, ovarian papillary serous adenocarcinoma, ovarian mucinous adenocarcinoma, and Ovarian Krukenberg tumors).

[0716] Cervical diseases and/or disorders include cervicitis, chronic cervicitis, mucopurulent cervicitis, cervical dysplasia, cervical polyps, Nabothian cysts, cervical erosion, cervical incompetence, and cervical neoplasms (including, for example, cervical carcinoma, squamous metaplasia, squamous cell carcinoma, adenosquamous cell neoplasia, and columnar cell neoplasia).

[0717] Additionally, diseases and/or disorders of the reproductive system include disorders and/or diseases of pregnancy, including miscarriage and stillbirth, such as early abortion, late abortion, spontaneous abortion, induced abortion, therapeutic abortion, threatened abortion, missed abortion, incomplete abortion, complete abortion, habitual abortion, missed abortion, and septic abortion; ectopic pregnancy, anemia, Rh incompatibility, vaginal bleeding during pregnancy, gestational diabetes, intrauterine growth retardation, polyhydramnios, HELLP syndrome, abruptio placentae, placenta previa, hyperemesis, preeclampsia, eclampsia, herpes gestationis, and urticaria of pregnancy. Additionally, the polynucleotides, polypeptides, and agonists or antagonists of the present invention may be used in the diagnosis, treatment, and/or prevention of diseases that can complicate pregnancy, including heart disease, heart failure, rheumatic heart disease, congenital heart disease, mitral valve prolapse, high blood pressure, anemia, kidney disease, infectious disease (e.g., rubella, cytomegalovirus, toxoplasmosis, infectious hepatitis, chlamydia, HIV, AIDS, and genital herpes), diabetes mellitus, Graves' disease, thyroiditis, hypothyroidism, Hashimoto's thyroiditis, chronic active hepatitis, cirrhosis of the liver, primary biliary cirrhosis, asthma, systemic lupus eryematosis, rheumatoid arthritis, myasthenia gravis, idiopathic thrombocytopenic purpura, appendicitis, ovarian cysts, gallbladder disorders,and obstruction of the intestine.

[0718] Complications associated with labor and parturition include premature rupture of the membranes, pre-term labor, post-term pregnancy, postmaturity, labor that progresses too slowly, fetal distress (e.g., abnormal heart rate (fetal or maternal), breathing problems, and abnormal fetal position), shoulder dystocia, prolapsed umbilical cord, amniotic fluid embolism, and aberrant uterine bleeding.

[0719] Further, diseases and/or disorders of the postdelivery period, including endometritis, myometritis, parametritis, peritonitis, pelvic thrombophlebitis, pulmonary embolism, endotoxemia, pyelonephritis, saphenous thrombophlebitis, mastitis, cystitis, postpartum hemorrhage, and inverted uterus.

[0720] Other disorders and/or diseases of the female reproductive system that may be diagnosed, treated, and/or prevented by the polynucleotides, polypeptides, and agonists or antagonists of the present invention include, for example, Turner's syndrome, pseudohermaphroditism, premenstrual syndrome, pelvic inflammatory disease, pelvic congestion (vascular engorgement), frigidity, anorgasmia, dyspareunia, ruptured fallopian tube, and Mittelschmerz.

[0721] Infectious Disease

[0722] Polynucleotides or polypeptides, as well as agonists or antagonists of the present invention can be used to treat or detect infectious agents. For example, by increasing the immune response, particularly increasing the proliferation and differentiation of B and/or T cells, infectious diseases may be treated. The immune response may be increased by either enhancing an existing immune response, or by initiating a new immune response. Alternatively, polynucleotides or polypeptides, as well as agonists or antagonists of the present invention may also directly inhibit the infectious agent, without necessarily eliciting an immune response.

[0723] Viruses are one example of an infectious agent that can cause disease or symptoms that can be treated or detected by a polynucleotide or polypeptide and/or agonist or antagonist of the present invention. Examples of viruses, include, but are not limited to Examples of viruses, include, but are not limited to the following DNA and RNA viruses and viral families: Arbovirus, Adenoviridae, Arenaviridae, Arterivirus, Birnaviridae, Bunyaviridae, Caliciviridae, Circoviridae, Coronaviridae, Dengue, EBV, HIV, Flaviviridae, Hepadnaviridae (Hepatitis), Herpesviridae (such as, Cytomegalovirus, Herpes Simplex, Herpes Zoster), Mononegavirus (e.g., Paramyxoviridae, Morbillivirus, Rhabdoviridae), Orthomyxoviridae (e.g., Influenza A, Influenza B, and parainfluenza), Papiloma virus, Papovaviridae, Parvoviridae, Picornaviridae, Poxyiridae (such as Smallpox or Vaccinia), Reoviridae (e.g., Rotavirus), Retroviridae (HTLV-I, HTLV-II, Lentivirus), and Togaviridae (e.g., Rubivirus). Viruses falling within these families can cause a variety of diseases or symptoms, including, but not limited to: arthritis, bronchiollitis, respiratory syncytial virus, encephalitis, eye infections (e.g., conjunctivitis, keratitis), chronic fatigue syndrome, hepatitis (A, B, C, E, Chronic Active, Delta), Japanese B encephalitis, Junin, Chikungunya, Rift Valley fever, yellow fever, meningitis, opportunistic infections (e.g., AIDS), pneumonia, Burkitt's Lymphoma, chickenpox, hemorrhagic fever, Measles, Mumps, Parainfluenza, Rabies, the common cold, Polio, leukemia, Rubella, sexually transmitted diseases, skin diseases (e.g., Kaposi's, warts), and viremia. polynucleotides or polypeptides, or agonists or antagonists of the invention, can be used to treat or detect any of these symptoms or diseases. In specific embodiments, polynucleotides, polypeptides, or agonists or antagonists of the invention are used to treat: meningitis, Dengue, EBV, and/or hepatitis (e.g., hepatitis B). In an additional specific embodiment polynucleotides, polypeptides, or agonists or antagonists of the invention are used to treat patients nonresponsive to one or more other commercially available hepatitis vaccines. In a further specific embodiment polynucleotides, polypeptides, or agonists or antagonists of the invention are used to treat AIDS.

[0724] Similarly, bacterial and fungal agents that can cause disease or symptoms and that can be treated or detected by a polynucleotide or polypeptide and/or agonist or antagonist of the present invention include, but not limited to, the following Gram-Negative and Gram-positive bacteria, bacterial families, and fungi: Actinomyces (e.g., Norcardia), Acinetobacter, Cryptococcus neoformans, Aspergillus, Bacillaceae (e.g., Bacillus anthrasis), Bacteroides (e.g., Bacteroides fragilis), Blastomycosis, Bordetella, Borrelia (e.g., Borrelia burgdorferi), Brucella, Candidia, Campylobacter, Chlamydia, Clostridium (e.g., Clostridium botulinum, Clostridium dificile, Clostridium perfringens, Clostridium tetani), Coccidioides, Corynebacterium (e.g., Corynebacterium diptheriae), Cryptococcus, Dermatocycoses, E. coli (e.g., Enterotoxigenic E. coli and Enterohemorrhagic E. coli), Enterobacter (e.g. Enterobacter aerogenes), Enterobacteriaceae (Klebsiella, Salmonella (e.g., Salmonella typhi, Salmonella enteritidis, Salmonella typhi), Serratia, Yersinia, Shigella), Erysipelothrix, Haemophilus (e.g., Haemophilus influenza type B), Helicobacter, Legionella (e.g., Legionella pneumophila), Leptospira, Listeria (e.g., Listeria monocytogenes), Mycoplasma, Mycobacterium (e.g., Mycobacterium leprae and Mycobacterium tuberculosis), Vibrio (e.g., Vibrio cholerae), Neisseriaceae (e.g., Neisseria gonorrhea, Neisseria meningitidis), Pasteurellacea, Proteus, Pseudomonas (e.g., Pseudomonas aeruginosa), Rickettsiaceae, Spirochetes (e.g., Treponema spp., Leptospira spp., Borrelia spp.), Shigella spp., Staphylococcus (e.g., Staphylococcus aureus), Meningiococcus, Pneumococcus and Streptococcus (e.g., Streptococcus pneumoniae and Groups A, B, and C Streptococci), and Ureaplasmas. These bacterial, parasitic, and fungal families can cause diseases or symptoms, including, but not limited to: antibiotic-resistant infections, bacteremia, endocarditis, septicemia, eye infections (e.g., conjunctivitis), uveitis, tuberculosis, gingivitis, bacterial diarrhea, opportunistic infections (e.g., AIDS related infections), paronychia, prosthesis-related infections, dental caries, Reiter's Disease, respiratory tract infections, such as Whooping Cough or Empyema, sepsis, Lyme Disease, Cat-Scratch Disease, dysentery, paratyphoid fever, food poisoning, Legionella disease, chronic and acute inflammation, erythema, yeast infections, typhoid, pneumonia, gonorrhea, meningitis (e.g., mengitis types A and B), chlamydia, syphillis, diphtheria, leprosy, brucellosis, peptic ulcers, anthrax, spontaneous abortions, birth defects, pneumonia, lung infections, ear infections, deafness, blindness, lethargy, malaise, vomiting, chronic diarrhea, Crohn's disease, colitis, vaginosis, sterility, pelvic inflammatory diseases, candidiasis, paratuberculosis, tuberculosis, lupus, botulism, gangrene, tetanus, impetigo, Rheumatic Fever, Scarlet Fever, sexually transmitted diseases, skin diseases (e.g., cellulitis, dermatocycoses), toxemia, urinary tract infections, wound infections, noscomial infections. Polynucleotides or polypeptides, agonists or antagonists of the invention, can be used to treat or detect any of these symptoms or diseases. In specific embodiments, polynucleotides, polypeptides, agonists or antagonists of the invention are used to treat: tetanus, diptheria, botulism, and/or meningitis type B.

[0725] Moreover, parasitic agents causing disease or symptoms that can be treated, prevented, and/or diagnosed by a polynucleotide or polypeptide and/or agonist or antagonist of the present invention include, but not limited to, the following families or class: Amebiasis, Babesiosis, Coccidiosis, Cryptosporidiosis, Dientamoebiasis, Dourine, Ectoparasitic, Giardias, Helminthiasis, Leishmaniasis, Schistisoma, Theileriasis, Toxoplasmosis, Trypanosomiasis, and Trichomonas and Sporozoans (e.g., Plasmodium virax, Plasmodium falciparium, Plasmodium malariae and Plasmodium ovale). These parasites can cause a variety of diseases or symptoms, including, but not limited to: Scabies, Trombiculiasis, eye infections, intestinal disease (e.g., dysentery, giardiasis), liver disease, lung disease, opportunistic infections (e.g., AIDS related), malaria, pregnancy complications, and toxoplasmosis. polynucleotides or polypeptides, or agonists or antagonists of the invention, can be used to treat, prevent, and/or diagnose any of these symptoms or diseases. In specific embodiments, polynucleotides, polypeptides, or agonists or antagonists of the invention are used to treat, prevent, and/or diagnose malaria.

[0726] Polynucleotides or polypeptides, as well as agonists or antagonists of the present invention of the present invention could either be by administering an effective amount of a polypeptide to the patient, or by removing cells from the patient, supplying the cells with a polynucleotide of the present invention, and returning the engineered cells to the patient (ex vivo therapy). Moreover, the polypeptide or polynucleotide of the present invention can be used as an antigen in a vaccine to raise an immune response against infectious disease.

[0727] Regeneration

[0728] Polynucleotides or polypeptides, as well as agonists or antagonists of the present invention can be used to differentiate, proliferate, and attract cells, leading to the regeneration of tissues. (See, Science 276:59-87 (1997)). The regeneration of tissues could be used to repair, replace, or protect tissue damaged by congenital defects, trauma (wounds, burns, incisions, or ulcers), age, disease (e.g. osteoporosis, osteocarthritis, periodontal disease, liver failure), surgery, including cosmetic plastic surgery, fibrosis, reperfusion injury, or systemic cytokine damage.

[0729] Tissues that could be regenerated using the present invention include organs (e.g., pancreas, liver, intestine, kidney, skin, endothelium), muscle (smooth, skeletal or cardiac), vasculature (including vascular and lymphatics), nervous, hematopoietic, and skeletal (bone, cartilage, tendon, and ligament) tissue. Preferably, regeneration occurs without or decreased scarring. Regeneration also may include angiogenesis.

[0730] Moreover, polynucleotides or polypeptides, as well as agonists or antagonists of the present invention, may increase regeneration of tissues difficult to heal. For example, increased tendon/ligament regeneration would quicken recovery time after damage. Polynucleotides or polypeptides, as well as agonists or antagonists of the present invention could also be used prophylactically in an effort to avoid damage. Specific diseases that could be treated include of tendinitis, carpal tunnel syndrome, and other tendon or ligament defects. A further example of tissue regeneration of non-healing wounds includes pressure ulcers, ulcers associated with vascular insufficiency, surgical, and traumatic wounds.

[0731] Similarly, nerve and brain tissue could also be regenerated by using polynucleotides or polypeptides, as well as agonists or antagonists of the present invention, to proliferate and differentiate nerve cells. Diseases that could be treated using this method include central and peripheral nervous system diseases, neuropathies, or mechanical and traumatic disorders (e.g., spinal cord disorders, head trauma, cerebrovascular disease, and stoke). Specifically, diseases-associated with peripheral nerve injuries, peripheral neuropathy (e.g., resulting from chemotherapy or other medical therapies), localized neuropathies, and central nervous system diseases (e.g., Alzheimer's disease, Parkinson's disease, Huntington's disease, amyotrophic lateral sclerosis, and Shy-Drager syndrome), could all be treated using the polynucleotides or polypeptides, as well as agonists or antagonists of the present invention.

[0732] Gastrointestinal Disorders

[0733] Polynucleotides or polypeptides, or agonists or antagonists of the present invention, may be used to treat, prevent, diagnose, and/or prognose gastrointestinal disorders, including inflammatory diseases and/or conditions, infections, cancers (e.g., intestinal neoplasms (carcinoid tumor of the small intestine, non-Hodgkin's lymphoma of the small intestine, small bowl lymphoma)), and ulcers, such as peptic ulcers.

[0734] Gastrointestinal disorders include dysphagia, odynophagia, inflammation of the esophagus, peptic esophagitis, gastric reflux, submucosal fibrosis and stricturing, Mallory-Weiss lesions, leiomyomas, lipomas, epidermal cancers, adeoncarcinomas, gastric retention disorders, gastroenteritis, gastric atrophy, gastric/stomach cancers, polyps of the stomach, autoimmune disorders such as pernicious anemia, pyloric stenosis, gastritis (bacterial, viral, eosinophilic, stress-induced, chronic erosive, atrophic, plasma cell, and Ménétrner's), and peritoneal diseases (e.g., chyloperioneum, hemoperitoneum, mesenteric cyst, mesenteric lymphadenitis, mesenteric vascular occlusion, panniculitis, neoplasms, peritonitis, pneumoperitoneum, bubphrenic abscess,).

[0735] Gastrointestinal disorders also include disorders associated with the small intestine, such as malabsorption syndromes, distension, irritable bowel syndrome, sugar intolerance, celiac disease, duodenal ulcers, duodenitis, tropical sprue, Whipple's disease, intestinal lymphangiectasia, Crohn's disease, appendicitis, obstructions of the ileum, Meckel's diverticulum, multiple diverticula, failure of complete rotation of the small and large intestine, lymphoma, and bacterial and parasitic diseases (such as Traveler's diarrhea, typhoid and paratyphoid, cholera, infection by Roundworms (Ascariasis lumbricoides), Hookworms (Ancylostoma duodenale), Threadworms (Enterobius vermicularis), Tapeworms (Taenia saginata, Echinococcus granulosus, Diphyllobothrium spp., and T. solium).

[0736] Liver diseases and/or disorders include intrahepatic cholestasis (alagille syndrome, biliary liver cirrhosis), fatty liver (alcoholic fatty liver, reye syndrome), hepatic vein thrombosis, hepatolentricular degeneration, hepatomegaly, hepatopulmonary syndrome, hepatorenal syndrome, portal hypertension (esophageal and gastric varices), liver abscess (amebic liver abscess), liver cirrhosis (alcoholic, biliary and experimental), alcoholic liver diseases (fatty liver, hepatitis, cirrhosis), parasitic (hepatic echinococcosis, fascioliasis, amebic liver abscess), jaundice (hemolytic, hepatocellular, and cholestatic), cholestasis, portal hypertension, liver enlargement, ascites, hepatitis (alcoholic hepatitis, animal hepatitis, chronic hepatitis (autoimmune, hepatitis B, hepatitis C, hepatitis D, drug induced), toxic hepatitis, viral human hepatitis (hepatitis A, hepatitis B, hepatitis C, hepatitis D, hepatitis E), Wilson's disease, granulomatous hepatitis, secondary biliary cirrhosis, hepatic encephalopathy, portal hypertension, varices, hepatic encephalopathy, primary biliary cirrhosis, primary sclerosing cholangitis, hepatocellular adenoma, hemangiomas, bile stones, liver failure (hepatic encephalopathy, acute liver failure), and liver neoplasms (angiomyolipoma, calcified liver metastases, cystic liver metastases, epithelial tumors, fibrolamellar hepatocarcinoma, focal nodular hyperplasia, hepatic adenoma, hepatobiliary cystadenoma, hepatoblastoma, hepatocellular carcinoma, hepatoma, liver cancer, liver hemangioendothelioma, mesenchymal hamartoma, mesenchymal tumors of liver, nodular regenerative hyperplasia, benign liver tumors (Hepatic cysts [Simple cysts, Polycystic liver disease, Hepatobiliary cystadenoma, Choledochal cyst], Mesenchymal tumors [Mesenchymal hamartoma, Infantile hemangioendothelioma, Hemangioma, Peliosis hepatis, Lipomas, Inflammatory pseudotumor, Miscellaneous], Epithelial tumors [Bile duct epithelium (Bile duct hamartoma, Bile duct adenoma), Hepatocyte (Adenoma, Focal nodular hyperplasia, Nodular regenerative hyperplasia)], malignant liver tumors [hepatocellular, hepatoblastoma, hepatocellular carcinoma, cholangiocellular, cholangiocarcinoma, cystadenocarcinoma, tumors of blood vessels, angiosarcoma, Karposi's sarcoma, hemangioendothelioma, other tumors, embryonal sarcoma, fibrosarcoma, leiomyosarcoma, rhabdomyosarcoma, carcinosarcoma, teratoma, carcinoid, squamous carcinoma, primary lymphoma]), peliosis hepatis, erythrohepatic porphyria, hepatic porphyria (acute intermittent porphyria, porphyria cutanea tarda), Zellweger syndrome).

[0737] Pancreatic diseases and/or disorders include acute pancreatitis, chronic pancreatitis (acute necrotizing pancreatitis, alcoholic pancreatitis), neoplasms (adenocarcinoma of the pancreas, cystadenocarcinoma, insulinoma, gastrinoma, and glucagonoma, cystic neoplasms, islet-cell tumors, pancreoblastoma), and other pancreatic diseases (e.g., cystic fibrosis, cyst (pancreatic pseudocyst, pancreatic fistula, insufficiency)).

[0738] Gallbladder diseases include gallstones (cholelithiasis and choledocholithiasis), postcholecystectomy syndrome, diverticulosis of the gallbladder, acute cholecystitis, chronic cholecystitis, bile duct tumors, and mucocele.

[0739] Diseases and/or disorders of the large intestine include antibiotic-associated colitis, diverticulitis, ulcerative colitis, acquired megacolon, abscesses, fungal and bacterial infections, anorectal disorders (e.g., fissures, hemorrhoids), colonic diseases (colitis, colonic neoplasms [colon cancer, adenomatous colon polyps (e.g., villous adenoma), colon carcinoma, colorectal cancer], colonic diverticulitis, colonic diverticulosis, megacolon [Hirschsprung disease, toxic megacolon]; sigmoid diseases [proctocolitis, sigmoin neoplasms]), constipation, Crohn's disease, diarrhea (infantile diarrhea, dysentery), duodenal diseases (duodenal neoplasms, duodenal obstruction, duodenal ulcer, duodenitis), enteritis (enterocolitis), HIV enteropathy, ileal diseases (ileal neoplasms, ileitis), immunoproliferative small intestinal disease, inflammatory bowel disease (ulcerative colitis, Crohn's disease), intestinal atresia, parasitic diseases (anisakiasis, balantidiasis, blastocystis infections, cryptosporidiosis, dientamoebiasis, amebic dysentery, giardiasis), intestinal fistula (rectal fistula), intestinal neoplasms (cecal neoplasms, colonic neoplasms, duodenal neoplasms, ileal neoplasms, intestinal polyps, jejunal neoplasms, rectal neoplasms), intestinal obstruction (afferent loop syndrome, duodenal obstruction, impacted feces, intestinal pseudo-obstruction [cecal volvulus], intussusception), intestinal perforation, intestinal polyps (colonic polyps, gardner syndrome, peutz-jeghers syndrome), jejunal diseases (jejunal neoplasms), malabsorption syndromes (blind loop syndrome, celiac disease, lactose intolerance, short bowl syndrome, tropical sprue, whipple's disease), mesenteric vascular occlusion, pneumatosis cystoides intestinalis, protein-losing enteropathies (intestinal lymphagiectasis), rectal diseases (anus diseases, fecal incontinence, hemorrhoids, proctitis, rectal fistula, rectal prolapse, rectocele), peptic ulcer (duodenal ulcer, peptic esophagitis, hemorrhage, perforation, stomach ulcer, Zollinger-Ellison syndrome), postgastrectomy syndromes (dumping syndrome), stomach diseases (e.g., achlorhydria, duodenogastric reflux (bile reflux), gastric antral vascular ectasia, gastric fistula, gastric outlet obstruction, gastritis (atrophic or hypertrophic), gastroparesis, stomach dilatation, stomach diverticulum, stomach neoplasms (gastric cancer, gastric polyps, gastric adenocarcinoma, hyperplastic gastric polyp), stomach rupture, stomach ulcer, stomach volvulus), tuberculosis, visceroptosis, vomiting (e.g., hematemesis, hyperemesis gravidarum, postoperative nausea and vomiting) and hemorrhagic colitis.

[0740] Further diseases and/or disorders of the gastrointestinal system include biliary tract diseases, such as, gastroschisis, fistula (e.g., biliary fistula, esophageal fistula, gastric fistula, intestinal fistula, pancreatic fistula), neoplasms (e.g., biliary tract neoplasms, esophageal neoplasms, such as adenocarcinoma of the esophagus, esophageal squamous cell carcinoma, gastrointestinal neoplasms, pancreatic neoplasms, such as adenocarcinoma of the pancreas, mucinous cystic neoplasm of the pancreas, pancreatic cystic neoplasms, pancreatoblastoma, and peritoneal neoplasms), esophageal disease (e.g., bullous diseases, candidiasis, glycogenic acanthosis, ulceration, barrett esophagus varices, atresia, cyst, diverticulum (e.g., Zenker's diverticulum), fistula (e.g., tracheoesophageal fistula), motility disorders (e.g., CREST syndrome, deglutition disorders, achalasia, spasm, gastroesophageal reflux), neoplasms, perforation (e.g., Boerhaave syndrome, Mallory-Weiss syndrome), stenosis, esophagitis, diaphragmatic hernia (e.g., hiatal hernia); gastrointestinal diseases, such as, gastroenteritis (e.g., cholera morbus, norwalk virus infection), hemorrhage (e.g., hematemesis, melena, peptic ulcer hemorrhage), stomach neoplasms (gastric cancer, gastric polyps, gastric adenocarcinoma, stomach cancer)), hernia (e.g., congenital diaphragmatic hernia, femoral hernia, inguinal hernia, obturator hernia, umbilical hernia, ventral hernia), and intestinal diseases (e.g., cecal diseases (appendicitis, cecal neoplasms)).

[0741] Chemotaxis

[0742] Polynucleotides or polypeptides, as well as agonists or antagonists of the present invention may have chemotaxis activity. A chemotaxic molecule attracts or mobilizes cells (e.g., monocytes, fibroblasts, neutrophils, T-cells, mast cells, eosinophils, epithelial and/or endothelial cells) to a particular site in the body, such as inflammation, infection, or site of hyperproliferation. The mobilized cells can then fight off and/or heal the particular trauma or abnormality.

[0743] Polynucleotides or polypeptides, as well as agonists or antagonists of the present invention may increase chemotaxic activity of particular cells. These chemotactic molecules can then be used to treat inflammation, infection, hyperproliferative disorders, or any immune system disorder by increasing the number of cells targeted to a particular location in the body. For example, chemotaxic molecules can be used to treat wounds and other trauma to tissues by attracting immune cells to the injured location. Chemotactic molecules of the present invention can also attract fibroblasts, which can be used to treat wounds.

[0744] It is also contemplated that polynucleotides or polypeptides, as well as agonists or antagonists of the present invention may inhibit chemotactic activity. These molecules could also be used to treat disorders. Thus, polynucleotides or polypeptides, as well as agonists or antagonists of the present invention could be used as an inhibitor of chemotaxis.

[0745] Binding Activity

[0746] A polypeptide of the present invention may be used to screen for molecules that bind to the polypeptide or for molecules to which the polypeptide binds. The binding of the polypeptide and the molecule may activate (agonist), increase, inhibit (antagonist), or decrease activity of the polypeptide or the molecule bound. Examples of such molecules include antibodies, oligonucleotides, proteins (e.g., receptors),or small molecules.

[0747] Preferably, the molecule is closely related to the natural ligand of the polypeptide, e.g., a fragment of the ligand, or a natural substrate, a ligand, a structural or functional mimetic. (See, Coligan et al., Current Protocols in Immunology 1(2):Chapter 5 (1991)). Similarly, the molecule can be closely related to the natural receptor to which the polypeptide binds, or at least, a fragment of the receptor capable of being bound by the polypeptide (e.g., active site). In either case, the molecule can be rationally designed using known techniques.

[0748] Preferably, the screening for these molecules involves producing appropriate cells which express the polypeptide. Preferred cells include cells from mammals, yeast, Drosophila, or E. coli. Cells expressing the polypeptide (or cell membrane containing the expressed polypeptide) are then preferably contacted with a test compound potentially containing the molecule to observe binding, stimulation, or inhibition of activity of either the polypeptide or the molecule.

[0749] The assay may simply test binding of a candidate compound to the polypeptide, wherein binding is detected by a label, or in an assay involving competition with a labeled competitor. Further, the assay may test whether the candidate compound results in a signal generated by binding to the polypeptide.

[0750] Alternatively, the assay can be carried out using cell-free preparations, polypeptide/molecule affixed to a solid support, chemical libraries, or natural product mixtures. The assay may also simply comprise the steps of mixing a candidate compound with a solution containing a polypeptide, measuring polypeptide/molecule activity or binding, and comparing the polypeptide/molecule activity or binding to a standard.

[0751] Preferably, an ELISA assay can measure polypeptide level or activity in a sample (e.g., biological sample) using a monoclonal or polyclonal antibody. The antibody can measure polypeptide level or activity by either binding, directly or indirectly, to the polypeptide or by competing with the polypeptide for a substrate.

[0752] Additionally, the receptor to which the polypeptide of the present invention binds can be identified by numerous methods known to those of skill in the art, for example, ligand panning and FACS sorting (Coligan, et al., Current Protocols in Immun., 1(2), Chapter 5, (1991)). For example, expression cloning is employed wherein polyadenylated RNA is prepared from a cell responsive to the polypeptides, for example, NIH3T3 cells which are known to contain multiple receptors for the FGF family proteins, and SC-3 cells, and a cDNA library created from this RNA is divided into pools and used to transfect COS cells or other cells that are not responsive to the polypeptides. Transfected cells which are grown on glass slides are exposed to the polypeptide of the present invention, after they have been labeled. The polypeptides can be labeled by a variety of means including iodination or inclusion of a recognition site for a site-specific protein kinase.

[0753] Following fixation and incubation, the slides are subjected to auto-radiographic analysis. Positive pools are identified and sub-pools are prepared and re-transfected using an iterative sub-pooling and re-screening process, eventually yielding a single clones that encodes the putative receptor.

[0754] As an alternative approach for receptor identification, the labeled polypeptides can be photoaffinity linked with cell membrane or extract preparations that express the receptor molecule. Cross-linked material is resolved by PAGE analysis and exposed to X-ray film. The labeled complex containing the receptors of the polypeptides can be excised, resolved into peptide fragments, and subjected to protein microsequencing. The amino acid sequence obtained from microsequencing would be used to design a set of degenerate oligonucleotide probes to screen a cDNA library to identify the genes encoding the putative receptors.

[0755] Moreover, the techniques of gene-shuffling, motif-shuffling, exon-shuffling, and/or codon-shuffling (collectively referred to as “DNA shuffling”) may be employed to modulate the activities of the polypeptide of the present invention thereby effectively generating agonists and antagonists of the polypeptide of the present invention. See generally, U.S. Pat. Nos. 5,605,793, 5,811,238, 5,830,721, 5,834,252, and 5,837,458, and Patten, P. A., et al., Curr. Opinion Biotechnol. 8:724-33 (1997); Harayama, S. Trends Biotechnol. 16(2):76-82 (1998); Hansson, L. O., et al., J. Mol. Biol. 287:265-76 (1999); and Lorenzo, M. M. and Blasco, R. Biotechniques 24(2):308-13 (1998); each of these patents and publications are hereby incorporated by reference). In one embodiment, alteration of polynucleotides and corresponding polypeptides may be achieved by DNA shuffling. DNA shuffling involves the assembly of two or more DNA segments into a desired molecule by homologous, or site-specific, recombination. In another embodiment, polynucleotides and corresponding polypeptides may be altered by being subjected to random mutagenesis by error-prone PCR, random nucleotide insertion or other methods prior to recombination. In another embodiment, one or more components, motifs, sections, parts, domains, fragments, etc., of the polypeptide of the present invention may be recombined with one or more components, motifs, sections, parts, domains, fragments, etc. of one or more heterologous molecules. In preferred embodiments, the heterologous molecules are family members. In further preferred embodiments, the heterologous molecule is a growth factor such as, for example, platelet-derived growth factor (PDGF), insulin-like growth factor (IGF-I), transforming growth factor (TGF)-alpha, epidermal growth factor (EGF), fibroblast growth factor (FGF), TGF-beta, bone morphogenetic protein (BMP)-2, BMP-4, BMP-5, BMP-6, BMP-7, activins A and B, decapentaplegic(dpp), 60A, OP-2, dorsalin, growth differentiation factors (GDFs), nodal, MIS, inhibin-alpha, TGF-beta1, TGF-beta2, TGF-beta3, TGF-beta5, and glial-derived neurotrophic factor (GDNF).

[0756] Other preferred fragments are biologically active fragments of the polypeptide of the present invention. Biologically active fragments are those exhibiting activity similar, but not necessarily identical, to an activity of the polypeptide of the present invention. The biological activity of the fragments may include an improved desired activity, or a decreased undesirable activity.

[0757] Additionally, this invention provides a method of screening compounds to identify those which modulate the action of the polypeptide of the present invention. An example of such an assay comprises combining a mammalian fibroblast cell, a the polypeptide of the present invention, the compound to be screened and ³[H] thymidine under cell culture conditions where the fibroblast cell would normally proliferate. A control assay may be performed in the absence of the compound to be screened and compared to the amount of fibroblast proliferation in the presence of the compound to determine if the compound stimulates proliferation by determining the uptake of ³[H] thymidine in each case. The amount of fibroblast cell proliferation is measured by liquid scintillation chromatography which measures the incorporation of ³[H] thymidine. Both agonist and antagonist compounds may be identified by this procedure.

[0758] In another method, a mammalian cell or membrane preparation expressing a receptor for a polypeptide of the present invention is incubated with a labeled polypeptide of the present invention in the presence of the compound. The ability of the compound to enhance or block this interaction could then be measured. Alternatively, the response of a known second messenger system following interaction of a compound to be screened and the receptor is measured and the ability of the compound to bind to the receptor and elicit a second messenger response is measured to determine if the compound is a potential agonist or antagonist. Such second messenger systems include but are not limited to, cAMP guanylate cyclase, ion channels or phosphoinositide hydrolysis.

[0759] All of these above assays can be used as diagnostic or prognostic markers. The molecules discovered using these assays can be used to treat disease or to bring about a particular result in a patient (e.g., blood vessel growth) by activating or inhibiting the polypeptide/molecule. Moreover, the assays can discover agents which may inhibit or enhance the production of the polypeptides of the invention from suitably manipulated cells or tissues.

[0760] Therefore, the invention includes a method of identifying compounds which bind to a polypeptide of the invention comprising the steps of: (a) incubating a candidate binding compound with a polypeptide of the present invention; and (b) determining if binding has occurred. Moreover, the invention includes a method of identifying agonists/antagonists comprising the steps of: (a) incubating a candidate compound with a polypeptide of the present invention, (b) assaying a biological activity, and (b) determining if a biological activity of the polypeptide has been altered.

[0761] Targeted Delivery

[0762] In another embodiment, the invention provides a method of delivering compositions to targeted cells expressing a receptor for a polypeptide of the invention, or cells expressing a cell bound form of a polypeptide of the invention.

[0763] As discussed herein, polypeptides or antibodies of the invention may be associated with heterologous polypeptides, heterologous nucleic acids, toxins, or prodrugs via hydrophobic, hydrophilic, ionic and/or covalent interactions. In one embodiment, the invention provides a method for the specific delivery of compositions of the invention to cells by administering polypeptides of the invention (including antibodies) that are associated with heterologous polypeptides or nucleic acids. In one example, the invention provides a method for delivering a therapeutic protein into the targeted cell. In another example, the invention provides a method for delivering a single stranded nucleic acid (e.g., antisense or ribozymes) or double stranded nucleic acid (e.g., DNA that can integrate into the cell's genome or replicate episomally and that can be transcribed) into the targeted cell.

[0764] In another embodiment, the invention provides a method for the specific destruction of cells (e.g., the destruction of tumor cells) by administering polypeptides of the invention (e.g., polypeptides of the invention or antibodies of the invention) in association with toxins or cytotoxic prodrugs.

[0765] By “toxin” is meant compounds that bind and activate endogenous cytotoxic effector systems, radioisotopes, holotoxins, modified toxins, catalytic subunits of toxins, or any molecules or enzymes not normally present in or on the surface of a cell that under defined conditions cause the cell's death. Toxins that may be used according to the methods of the invention include, but are not limited to, radioisotopes known in the art, compounds such as, for example, antibodies (or complement fixing containing portions thereof) that bind an inherent or induced endogenous cytotoxic effector system, thymidine kinase, endonuclease, RNAse, alpha toxin, ricin, abrin, Pseudomonas exotoxin A, diphtheria toxin, saporin, momordin, gelonin, pokeweed antiviral protein, alpha-sarcin and cholera toxin. By “cytotoxic prodrug” is meant a non-toxic compound that is converted by an enzyme, normally present in the cell, into a cytotoxic compound. Cytotoxic prodrugs that may be used according to the methods of the invention include, but are not limited to, glutamyl derivatives of benzoic acid mustard alkylating agent, phosphate derivatives of etoposide or mitomycin C, cytosine arabinoside, daunorubisin, and phenoxyacetamide derivatives of doxorubicin.

[0766] Drug Screening

[0767] Further contemplated is the use of the polypeptides of the present invention, or the polynucleotides encoding these polypeptides, to screen for molecules which modify the activities of the polypeptides of the present invention. Such a method would include contacting the polypeptide of the present invention with a selected compound(s) suspected of having antagonist or agonist activity, and assaying the activity of these polypeptides following binding.

[0768] This invention is particularly useful for screening therapeutic compounds by using the polypeptides of the present invention, or binding fragments thereof, in any of a variety of drug screening techniques. The polypeptide or fragment employed in such a test may be affixed to a solid support, expressed on a cell surface, free in solution, or located intracellularly. One method of drug screening utilizes eukaryotic or prokaryotic host cells which are stably transformed with recombinant nucleic acids expressing the polypeptide or fragment. Drugs are screened against such transformed cells in competitive binding assays. One may measure, for example, the formulation of complexes between the agent being tested and a polypeptide of the present invention.

[0769] Thus, the present invention provides methods of screening for drugs or any other agents which affect activities mediated by the polypeptides of the present invention. These methods comprise contacting such an agent with a polypeptide of the present invention or a fragment thereof and assaying for the presence of a complex between the agent and the polypeptide or a fragment thereof, by methods well known in the art. In such a competitive binding assay, the agents to screen are typically labeled. Following incubation, free agent is separated from that present in bound form, and the amount of free or uncomplexed label is a measure of the ability of a particular agent to bind to the polypeptides of the present invention.

[0770] Another technique for drug screening provides high throughput screening for compounds having suitable binding affinity to the polypeptides of the present invention, and is described in great detail in European Patent Application 84/03564, published on Sep. 13, 1984, which is incorporated herein by reference herein. Briefly stated, large numbers of different small peptide test compounds are synthesized on a solid substrate, such as plastic pins or some other surface. The peptide test compounds are reacted with polypeptides of the present invention and washed. Bound polypeptides are then detected by methods well known in the art. Purified polypeptides are coated directly onto plates for use in the aforementioned drug screening techniques. In addition, non-neutralizing antibodies may be used to capture the peptide and immobilize it on the solid support.

[0771] This invention also contemplates the use of competitive drug screening assays in which neutralizing antibodies capable of binding polypeptides of the present invention specifically compete with a test compound for binding to the polypeptides or fragments thereof. In this manner, the antibodies are used to detect the presence of any peptide which shares one or more antigenic epitopes with a polypeptide of the invention.

[0772] Antisense and Ribozyme (Antagonists)

[0773] In specific embodiments, antagonists according to the present invention are nucleic acids corresponding to the sequences contained in SEQ ID NO:X, or the complementary strand thereof, and/or to CDNA sequences contained in cDNA Clone ID NO:Z identified for example, in Table 1A. In one embodiment, antisense sequence is generated internally, by the organism, in another embodiment, the antisense sequence is separately administered (see, for example, O'C.onnor, J., Neurochem. 56:560 (1991). Oligodeoxynucleotides as Antisense Inhibitors of Gene Expression, CRC Press, Boca Raton, Fla. (1988). Antisense technology can be used to control gene expression through antisense DNA or RNA, or through triple-helix formation. Antisense techniques are discussed for example, in Okano, J., Neurochem. 56:560 (1991); Oligodeoxynucleotides as Antisense Inhibitors of Gene Expression, CRC Press, Boca Raton, Fla. (1988). Triple helix formation is discussed in, for instance, Lee et al., Nucleic Acids Research 6:3073 (1979); Cooney et al., Science 241:456 (1988); and Dervan et al., Science 251:1300 (1991). The methods are based on binding of a polynucleotide to a complementary DNA or RNA.

[0774] For example, the use of c-myc and c-myb antisense RNA constructs to inhibit the growth of the non-lymphocytic leukemia cell line HL-60 and other cell lines was previously described. (Wickstrom et al. (1988); Anfossi et al. (1989)). These experiments were performed in vitro by incubating cells with the oligoribonucleotide. A similar procedure for in vivo use is described in WO 91/15580. Briefly, a pair of oligonucleotides for a given antisense RNA is produced as follows: A sequence complimentary to the first 15 bases of the open reading frame is flanked by an EcoR1 site on the 5 end and a Hind III site on the 3 end. Next, the pair of oligonucleotides is heated at 90° C. for one minute and then annealed in 2× ligation buffer (20 mM TRIS HCl pH 7.5, 10 mM MgCl2, 10 MM dithiothreitol (DTT) and 0.2 mM ATP) and then ligated to the EcoR1/Hind III site of the retroviral vector PMV7 (WO 91/15580).

[0775] For example, the 5′ coding portion of a polynucleotide that encodes the polypeptide of the present invention may be used to design an antisense RNA oligonucleotide of from about 10 to 40 base pairs in length. A DNA oligonucleotide is designed to be complementary to a region of the gene involved in transcription thereby preventing transcription and the production of the receptor. The antisense RNA oligonucleotide hybridizes to the mRNA in vivo and blocks translation of the mRNA molecule into receptor polypeptide.

[0776] In one embodiment, the antisense nucleic acid of the invention is produced intracellularly by transcription from an exogenous sequence. For example, a vector or a portion thereof, is transcribed, producing an antisense nucleic acid (RNA) of the invention. Such a vector would contain a sequence encoding the antisense nucleic acid. Such a vector can remain episomal or become chromosomally integrated, as long as it can be transcribed to produce the desired antisense RNA. Such vectors can be constructed by recombinant DNA technology methods standard in the art. Vectors can be plasmid, viral, or others known in the art, used for replication and expression in vertebrate cells. Expression of the sequence encoding the polypeptide of the present invention or fragments thereof, can be by any promoter known in the art to act in vertebrate, preferably human cells. Such promoters can be inducible or constitutive. Such promoters include, but are not limited to, the SV40 early promoter region (Bemoist and Chambon, Nature 29:304-310 (1981), the promoter contained in the 3′ long terminal repeat of Rous sarcoma virus (Yamamoto et al., Cell 22:787-797 (1980), the herpes thymidine promoter (Wagner et al., Proc. Natl. Acad. Sci. U.S.A. 78:1441-1445 (1981), the regulatory sequences of the metallothionein gene (Brinster, et al., Nature 296:39-42 (1982)), etc.

[0777] The antisense nucleic acids of the invention comprise a sequence complementary to at least a portion of an RNA transcript of a gene of the present invention. However, absolute complementarity, although preferred, is not required. A sequence “complementary to at least a portion of an RNA,” referred to herein, means a sequence having sufficient complementarity to be able to hybridize with the RNA, forming a stable duplex; in the case of double stranded antisense nucleic acids, a single strand of the duplex DNA may thus be tested, or triplex formation may be assayed. The ability to hybridize will depend on both the degree of complementarity and the length of the antisense nucleic acid. Generally, the larger the hybridizing nucleic acid, the more base mismatches with a RNA it may contain and still form a stable duplex (or triplex as the case may be). One skilled in the art can ascertain a tolerable degree of mismatch by use of standard procedures to determine the melting point of the hybridized complex.

[0778] Oligonucleotides that are complementary to the 5′ end of the message, e.g., the 5′ untranslated sequence up to and including the AUG initiation codon, should work most efficiently at inhibiting translation. However, sequences complementary to the 3′ untranslated sequences of mRNAs have been shown to be effective at inhibiting translation of mRNAs as well. See generally, Wagner, R., 1994, Nature 372:333-335. Thus, oligonucleotides complementary to either the 5′- or 3′- non-translated, non-coding regions of polynucleotide sequences described herein could be used in an antisense approach to inhibit translation of endogenous mRNA. Oligonucleotides complementary to the 5′ untranslated region of the mRNA should include the complement of the AUG start codon. Antisense oligonucleotides complementary to mRNA coding regions are less efficient inhibitors of translation but could be used in accordance with the invention. Whether designed to hybridize to the 5′-, 3′- or coding region of mRNA of the present invention, antisense nucleic acids should be at least six nucleotides in length, and are preferably oligonucleotides ranging from 6 to about 50 nucleotides in length. In specific aspects the oligonucleotide is at least 10 nucleotides, at least 17 nucleotides, at least 25 nucleotides or at least 50 nucleotides.

[0779] The polynucleotides of the invention can be DNA or RNA or chimeric mixtures or derivatives or modified versions thereof, single-stranded or double-stranded. The oligonucleotide can be modified at the base moiety, sugar moiety, or phosphate backbone, for example, to improve stability of the molecule, hybridization, etc. The oligonucleotide may include other appended groups such as peptides (e.g., for targeting host cell receptors in vivo), or agents facilitating transport across the cell membrane (see, e.g., Letsinger et al., 1989, Proc. Natl. Acad. Sci. U.S.A. 86:6553-6556; Lemaitre et al., 1987, Proc. Natl. Acad. Sci. 84:648-652; PCT Publication No. WO88/09810, published Dec. 15, 1988) or the blood-brain barrier (see, e.g., PCT Publication No. WO89/10134, published Apr. 25, 1988), hybridization-triggered cleavage agents. (See, e.g., Krol et al., 1988, BioTechniques 6:958-976) or intercalating agents. (See, e.g., Zon, 1988, Pharm. Res. 5:539-549). To this end, the oligonucleotide may be conjugated to another molecule, e.g., a peptide, hybridization triggered cross-linking agent, transport agent, hybridization-triggered cleavage agent, etc.

[0780] The antisense oligonucleotide may comprise at least one modified base moiety which is selected from the group including, but not limited to, 5-fluorouracil, 5-bromouracil, 5-chlorouracil, 5-iodouracil, hypoxanthine, xantine, 4-acetylcytosine, 5-(carboxyhydroxylmethyl) uracil, 5-carboxymethylaminomethyl-2-thiouridine, 5-carboxymethylaminomethyluracil, dihydrouracil, beta-D-galactosylqueosine, inosine, N6-isopentenyladenine, 1-methylguanine, 1-methylinosine, 2,2-dimethylguanine, 2-methyladenine, 2-methylguanine, 3-methylcytosine, 5-methylcytosine, N6-adenine, 7-methylguanine, 5-methylaminomethyluracil, 5-methoxyaminomethyl-2-thiouracil, beta-D-mannosylqueosine, 5′-methoxycarboxymethyluracil, 5-methoxyuracil, 2-methylthio-N6-isopentenyladenine, uracil-5-oxyacetic acid (v), wybutoxosine, pseudouracil, queosine, 2-thiocytosine, 5-methyl-2-thiouracil, 2-thiouracil, 4-thiouracil, 5-methyluracil, uracil-5-oxyacetic acid methylester, uracil-5-oxyacetic acid (v), 5-methyl-2-thiouracil, 3-(3-amino-3-N-2-carboxypropyl) uracil, (acp3)w, and 2,6-diaminopurine.

[0781] The antisense oligonucleotide may also comprise at least one modified sugar moiety selected from the group including, but not limited to, arabinose, 2-fluoroarabinose, xylulose, and hexose.

[0782] In yet another embodiment, the antisense oligonucleotide comprises at least one modified phosphate backbone selected from the group including, but not limited to, a phosphorothioate, a phosphorodithioate, a phosphoramidothioate, a phosphoramidate, a phosphordiamidate, a methylphosphonate, an alkyl phosphotriester, and a formacetal or analog thereof.

[0783] In yet another embodiment, the antisense oligonucleotide is an a-anomeric oligonucleotide. An a-anomeric oligonucleotide forms specific double-stranded hybrids with complementary RNA in which, contrary to the usual b-units, the strands run parallel to each other (Gautier et al., 1987, Nucl. Acids Res. 15:6625-6641). The oligonucleotide is a 2′-O-methylribonucleotide (Inoue et al., 1987, Nucl. Acids Res. 15:6131-6148), or a chimeric RNA-DNA analogue (Inoue et al., 1987, FEBS Lett. 215:327-330).

[0784] Polynucleotides of the invention may be synthesized by standard methods known in the art, e.g. by use of an automated DNA synthesizer (such as are commercially available from Biosearch, Applied Biosystems, etc.). As examples, phosphorothioate oligonucleotides may be synthesized by the method of Stein et al. (1988, Nucl. Acids Res. 16:3209), methylphosphonate oligonucleotides can be prepared by use of controlled pore glass polymer supports (Sarin et al., 1988, Proc. Natl. Acad. Sci. U.S.A. 85:7448-7451), etc.

[0785] While antisense nucleotides complementary to the coding region sequence could be used, those complementary to the transcribed untranslated region are most preferred.

[0786] Potential antagonists according to the invention also include catalytic RNA, or a ribozyme (See, e.g., PCT International Publication WO 90/11364, published October 4, 1990; Sarver et al, Science 247:1222-1225 (1990). While ribozymes that cleave mRNA at site specific recognition sequences can be used to destroy mRNAs, the use of hammerhead ribozymes is preferred. Hammerhead ribozymes cleave mRNAs at locations dictated by flanking regions that form complementary base pairs with the target mRNA. The sole requirement is that the target mRNA have the following sequence of two bases: 5′-UG-3′. The construction and production of hammerhead ribozymes is well known in the art and is described more fully in Haseloff and Gerlach, Nature 334:585-591 (1988). There are numerous potential hammerhead ribozyme cleavage sites within the nucleotide sequence of SEQ ID NO:X. Preferably, the ribozyme is engineered so that the cleavage recognition site is located near the 5′ end of the mRNA; i.e., to increase efficiency and minimize the intracellular accumulation of non-functional mRNA transcripts.

[0787] As in the antisense approach, the ribozymes of the invention can be composed of modified oligonucleotides (e.g., for improved stability, targeting, etc.) and should be delivered to cells which express in vivo. DNA constructs encoding the ribozyme may be introduced into the cell in the same manner as described above for the introduction of antisense encoding DNA. A preferred method of delivery involves using a DNA construct “encoding” the ribozyme under the control of a strong constitutive promoter, such as, for example, pol III or pol II promoter, so that transfected cells will produce sufficient quantities of the ribozyme to destroy endogenous messages and inhibit translation. Since ribozymes unlike antisense molecules, are catalytic, a lower intracellular concentration is required for efficiency.

[0788] Antagonist/agonist compounds may be employed to inhibit the cell growth and proliferation effects of the polypeptides of the present invention on neoplastic cells and tissues, i.e. stimulation of angiogenesis of tumors, and, therefore, retard or prevent abnormal cellular growth and proliferation, for example, in tumor formation or growth.

[0789] The antagonist/agonist may also be employed to prevent hyper-vascular diseases, and prevent the proliferation of epithelial lens cells after extracapsular cataract surgery. Prevention of the mitogenic activity of the polypeptides of the present invention may also be desirous in cases such as restenosis after balloon angioplasty.

[0790] The antagonist/agonist may also be employed to prevent the growth of scar tissue during wound healing.

[0791] The antagonist/agonist may also be employed to treat the diseases described herein.

[0792] Thus, the invention provides a method of treating disorders or diseases, including but not limited to the disorders or diseases listed throughout this application, associated with overexpression of a polynucleotide of the present invention by administering to a patient (a) an antisense molecule directed to the polynucleotide of the present invention, and/or (b) a ribozyme directed to the polynucleotide of the present invention.

[0793] Binding Peptides and Other Molecules

[0794] The invention also encompasses screening methods for identifying polypeptides and nonpolypeptides that bind polypeptides of the invention, and the binding molecules identified thereby. These binding molecules are useful, for example, as agonists and antagonists of the polypeptides of the invention. Such agonists and antagonists can be used, in accordance with the invention, in the therapeutic embodiments described in detail, below.

[0795] This method comprises the steps of:

[0796] a. contacting polypeptides of the invention with a plurality of molecules; and

[0797] b. identifying a molecule that binds the polypeptides of the invention.

[0798] The step of contacting the polypeptides of the invention with the plurality of molecules may be effected in a number of ways. For example, one may contemplate immobilizing the polypeptides on a solid support and bringing a solution of the plurality of molecules in contact with the immobilized polypeptides. Such a procedure would be akin to an affinity chromatographic process, with the affinity matrix being comprised of the immobilized polypeptides of the invention. The molecules having a selective affinity for the polypeptides can then be purified by affinity selection. The nature of the solid support, process for attachment of the polypeptides to the solid support, solvent, and conditions of the affinity isolation or selection are largely conventional and well known to those of ordinary skill in the art.

[0799] Alternatively, one may also separate a plurality of polypeptides into substantially separate fractions comprising a subset of or individual polypeptides. For instance, one can separate the plurality of polypeptides by gel electrophoresis, column chromatography, or like method known to those of ordinary skill for the separation of polypeptides. The individual polypeptides can also be produced by a transformed host cell in such a way as to be expressed on or about its outer surface (e.g., a recombinant phage). Individual isolates can then be “probed” by the polypeptides of the invention, optionally in the presence of an inducer should one be required for expression, to determine if any selective affinity interaction takes place between the polypeptides and the individual clone. Prior to contacting the polypeptides with each fraction comprising individual polypeptides, the polypeptides could first be transferred to a solid support for additional convenience. Such a solid support may simply be a piece of filter membrane, such as one made of nitrocellulose or nylon. In this manner, positive clones could be identified from a collection of transformed host cells of an expression library, which harbor a DNA construct encoding a polypeptide having a selective affinity for polypeptides of the invention. Furthermore, the amino acid sequence of the polypeptide having a selective affinity for the polypeptides of the invention can be determined directly by conventional means or the coding sequence of the DNA encoding the polypeptide can frequently be determined more conveniently. The primary sequence can then be deduced from the corresponding DNA sequence. If the amino acid sequence is to be determined from the polypeptide itself, one may use microsequencing techniques. The sequencing technique may include mass spectroscopy.

[0800] In certain situations, it may be desirable to wash away any unbound polypeptides from a mixture of the polypeptides of the invention and the plurality of polypeptides prior to attempting to determine or to detect the presence of a selective affinity interaction. Such a wash step may be particularly desirable when the polypeptides of the invention or the plurality of polypeptides are bound to a solid support.

[0801] The plurality of molecules provided according to this method may be provided by way of diversity libraries, such as random or combinatorial peptide or nonpeptide libraries which can be screened for molecules that specifically bind polypeptides of the invention. Many libraries are known in the art that can be used, e.g., chemically synthesized libraries, recombinant (e.g., phage display libraries), and in vitro translation-based libraries. Examples of chemically synthesized libraries are described in Fodor et al., 1991, Science 251:767-773;Houghten et al., 1991, Nature 354:84-86; Lam et al., 1991, Nature 354:82-84; Medynski, 1994, Bio/Technology 12:709-710;Gallop et al., 1994, J. Medicinal Chemistry 37(9):1233-1251; Ohlmeyer et al., 1993, Proc. Natl. Acad. Sci. USA 90:10922-10926; Erb et al., 1994, Proc. Natl. Acad. Sci. USA 91:11422-11426;Houghten et al., 1992, Biotechniques 13:412; Jayawickreme et al., 1994, Proc. Natl. Acad. Sci. USA 91:1614-1618; Salmon et al., 1993, Proc. Natl. Acad. Sci. USA 90:11708-11712; PCT Publication No. WO 93/20242; and Brenner and Lerner, 1992, Proc. Natl. Acad. Sci. USA 89:5381-5383.

[0802] Examples of phage display libraries are described in Scott and Smith, 1990, Science 249:386-390; Devlin et al., 1990, Science, 249:404-406; Christian, R. B., et al., 1992, J. Mol. Biol. 227:711-718); Lenstra, 1992, J. Immunol. Meth. 152:149-157; Kay et al., 1993, Gene 128:59-65; and PCT Publication No. WO 94/18318 dated Aug. 18, 1994.

[0803] In vitro translation-based libraries include but are not limited to those described in PCT Publication No. WO 91/05058 dated Apr. 18, 1991; and Mattheakis et al., 1994, Proc. Natl. Acad. Sci. USA 91:9022-9026.

[0804] By way of examples of nonpeptide libraries, a benzodiazepine library (see e.g., Bunin et al., 1994, Proc. Natl. Acad. Sci. USA 91:4708-4712) can be adapted for use. Peptoid libraries (Simon et al., 1992, Proc. Natl. Acad. Sci. USA 89:9367-9371) can also be used. Another example of a library that can be used, in which the amide functionalities in peptides have been permethylated to generate a chemically transformed combinatorial library, is described by Ostresh et al. (1994, Proc. Natl. Acad. Sci. USA 91:11138-11142).

[0805] The variety of non-peptide libraries that are useful in the present invention is great. For example, Ecker and Crooke, 1995, Bio/Technology 13:351-360 list benzodiazepines, hydantoins, piperazinediones, biphenyls, sugar analogs, beta-mercaptoketones, arylacetic acids, acylpiperidines, benzopyrans, cubanes, xanthines, aminimides, and oxazolones as among the chemical species that form the basis of various libraries.

[0806] Non-peptide libraries can be classified broadly into two types: decorated monomers and oligomers. Decorated monomer libraries employ a relatively simple scaffold structure upon which a variety functional groups is added. Often the scaffold will be a molecule with a known useful pharmacological activity. For example, the scaffold might be the benzodiazepine structure.

[0807] Non-peptide oligomer libraries utilize a large number of monomers that are assembled together in ways that create new shapes that depend on the order of the monomers. Among the monomer units that have been used are carbamates, pyrrolinones, and morpholinos. Peptoids, peptide-like oligomers in which the side chain is attached to the alpha amino group rather than the alpha carbon, form the basis of another version of non-peptide oligomer libraries. The first non-peptide oligomer libraries utilized a single type of monomer and thus contained a repeating backbone. Recent libraries have utilized more than one monomer, giving the libraries added flexibility.

[0808] Screening the libraries can be accomplished by any of a variety of commonly known methods. See, e.g., the following references, which disclose screening of peptide libraries: Parmley and Smith, 1989, Adv. Exp. Med. Biol. 251:215-218; Scott and Smith, 1990, Science 249:386-390; Fowlkes et al., 1992; BioTechniques 13:422-427; Oldenburg et al., 1992, Proc. Natl. Acad. Sci. USA 89:5393-5397; Yu et al., 1994, Cell 76:933-945; Staudt et al., 1988, Science 241:577-580; Bock et al., 1992, Nature 355:564-566; Tuerk et al., 1992, Proc. Natl. Acad. Sci. USA 89:6988-6992; Ellington et al., 1992, Nature 355:850-852; U.S. Pat. No. 5,096,815, U.S. Pat. No. 5,223,409, and U.S. Pat. No. 5,198,346, all to Ladner et al.; Rebar and Pabo, 1993, Science 263:671-673; and CT Publication No. WO 94/18318.

[0809] In a specific embodiment, screening to identify a molecule that binds polypeptides of the invention can be carried out by contacting the library members with polypeptides of the invention immobilized on a solid phase and harvesting those library members that bind to the polypeptides of the invention. Examples of such screening methods, termed “panning” techniques are described by way of example in Parmley and Smith, 1988, Gene 73:305-318; Fowlkes et al., 1992, BioTechniques 13:422-427; PCT Publication No. WO 94/18318; and in references cited herein.

[0810] In another embodiment, the two-hybrid system for selecting interacting proteins in yeast (Fields and Song, 1989, Nature 340:245-246; Chien et al., 1991, Proc. Natl. Acad. Sci. USA 88:9578-9582) can be used to identify molecules that specifically bind to polypeptides of the invention.

[0811] Where the binding molecule is a polypeptide, the polypeptide can be conveniently selected from any peptide library, including random peptide libraries, combinatorial peptide libraries, or biased peptide libraries. The term “biased” is used herein to mean that the method of generating the library is manipulated so as to restrict one or more parameters that govern the diversity of the resulting collection of molecules, in this case peptides.

[0812] Thus, a truly random peptide library would generate a collection of peptides in which the probability of finding a particular amino acid at a given position of the peptide is the same for all 20 amino acids. A bias can be introduced into the library, however, by specifying, for example, that a lysine occur every fifth amino acid or that positions 4, 8, and 9 of a decapeptide library be fixed to include only arginine. Clearly, many types of biases can be contemplated, and the present invention is not restricted to any particular bias. Furthermore, the present invention contemplates specific types of peptide libraries, such as phage displayed peptide libraries and those that utilize a DNA construct comprising a lambda phage vector with a DNA insert.

[0813] As mentioned above, in the case of a binding molecule that is a polypeptide, the polypeptide may have about 6 to less than about 60 amino acid residues, preferably about 6 to about 10 amino acid residues, and most preferably, about 6 to about 22 amino acids. In another embodiment, a binding polypeptide has in the range of 15-100 amino acids, or 20-50 amino acids.

[0814] The selected binding polypeptide can be obtained by chemical synthesis or recombinant expression.

[0815] Other Activities

[0816] A polypeptide, polynucleotide, agonist, or antagonist of the present invention, as a result of the ability to stimulate vascular endothelial cell growth, may be employed in treatment for stimulating re-vascularization of ischemic tissues due to various disease conditions such as thrombosis, arteriosclerosis, and other cardiovascular conditions. The polypeptide, polynucleotide, agonist, or antagonist of the present invention may also be employed to stimulate angiogenesis and limb regeneration, as discussed above.

[0817] A polypeptide, polynucleotide, agonist, or antagonist of the present invention may also be employed for treating wounds due to injuries, burns, post-operative tissue repair, and ulcers since they are mitogenic to various cells of different origins, such as fibroblast cells and skeletal muscle cells, and therefore, facilitate the repair or replacement of damaged or diseased tissue.

[0818] A polypeptide, polynucleotide, agonist, or antagonist of the present invention may also be employed stimulate neuronal growth and to treat and prevent neuronal damage which occurs in certain neuronal disorders or neuro-degenerative conditions such as Alzheimer's disease, Parkinson's disease, and AIDS-related complex. A polypeptide, polynucleotide, agonist, or antagonist of the present invention may have the ability to stimulate chondrocyte growth, therefore, they may be employed to enhance bone and periodontal regeneration and aid in tissue transplants or bone grafts.

[0819] A polypeptide, polynucleotide, agonist, or antagonist of the present invention may be also be employed to prevent skin aging due to sunburn by stimulating keratinocyte growth.

[0820] A polypeptide, polynucleotide, agonist, or antagonist of the present invention may also be employed for preventing hair loss, since FGF family members activate hair-forming cells and promotes melanocyte growth. Along the same lines, a polypeptide, polynucleotide, agonist, or antagonist of the present invention may be employed to stimulate growth and differentiation of hematopoietic cells and bone marrow cells when used in combination with other cytokines.

[0821] A polypeptide, polynucleotide, agonist, or antagonist of the present invention may also be employed to maintain organs before transplantation or for supporting cell culture of primary tissues. A polypeptide, polynucleotide, agonist, or antagonist of the present invention may also be employed for inducing tissue of mesodermal origin to differentiate in early embryos.

[0822] A polypeptide, polynucleotide, agonist, or antagonist of the present invention may also increase or decrease the differentiation or proliferation of embryonic stem cells, besides, as discussed above, hematopoietic lineage.

[0823] A polypeptide, polynucleotide, agonist, or antagonist of the present invention may also be used to modulate mammalian characteristics, such as body height, weight, hair color, eye color, skin, percentage of adipose tissue, pigmentation, size, and shape (e.g., cosmetic surgery). Similarly, a polypeptide, polynucleotide, agonist, or antagonist of the present invention may be used to modulate mammalian metabolism affecting catabolism, anabolism, processing, utilization, and storage of energy.

[0824] A polypeptide, polynucleotide, agonist, or antagonist of the present invention may be used to change a mammal's mental state or physical state by influencing biorhythms, caricadic rhythms, depression (including depressive disorders), tendency for violence, tolerance for pain, reproductive capabilities (preferably by Activin or Inhibin-like activity), hormonal or endocrine levels, appetite, libido, memory, stress, or other cognitive qualities.

[0825] A polypeptide, polynucleotide, agonist, or antagonist of the present invention may also be used as a food additive or preservative, such as to increase or decrease storage capabilities, fat content, lipid, protein, carbohydrate, vitamins, minerals, cofactors or other nutritional components.

[0826] The above-recited applications have uses in a wide variety of hosts. Such hosts include, but are not limited to, human, murine, rabbit, goat, guinea pig, camel, horse, mouse, rat, hamster, pig, micro-pig, chicken, goat, cow, sheep, dog, cat, non-human primate, and human. In specific embodiments, the host is a mouse, rabbit, goat, guinea pig, chicken, rat, hamster, pig, sheep, dog or cat. In preferred embodiments, the host is a mammal. In most preferred embodiments, the host is a human.

[0827] Other Preferred Embodiments

[0828] Other preferred embodiments of the claimed invention include an isolated nucleic acid molecule comprising a nucleotide sequence which is at least 95% identical to a sequence of at least about 50 contiguous nucleotides in the nucleotide sequence of SEQ ID NO:X or the complementary strand thereto, the nucleotide sequence as defined in column 5 of Table 1A or columns 8 and 9 of Table 2 or the complementary strand thereto, and/or cDNA contained in Clone ID NO:Z.

[0829] Also preferred is a nucleic acid molecule wherein said sequence of contiguous nucleotides is included in the nucleotide sequence of the portion of SEQ ID NO:X as defined in column 5, “ORF (From-To)”, in Table lA.

[0830] Also preferred is a nucleic acid molecule wherein said sequence of contiguous nucleotides is included in the nucleotide sequence of the portion of SEQ ID NO:X as defined in columns 8 and 9, “NT From” and “NT To” respectively, in Table 2.

[0831] Also preferred is an isolated nucleic acid molecule comprising a nucleotide sequence which is at least 95% identical to a sequence of at least about 150 contiguous nucleotides in the nucleotide sequence of SEQ ID NO:X or the complementary strand thereto, the nucleotide sequence as defined in column 5 of Table 1A or columns 8 and 9 of Table 2 or the complementary strand thereto, and/or cDNA contained in Clone ID NO:Z.

[0832] Further preferred is an isolated nucleic acid molecule comprising a nucleotide sequence which is at least 95% identical to a sequence of at least about 500 contiguous nucleotides in the nucleotide sequence of SEQ ID NO:X or the complementary strand thereto, the nucleotide sequence as defined in column 5 of Table 1A or columns 8 and 9 of Table 2 or the complementary strand thereto, and/or cDNA contained in Clone ID NO:Z.

[0833] A further preferred embodiment is a nucleic acid molecule comprising a nucleotide sequence which is at least 95% identical to the nucleotide sequence of the portion of SEQ ID NO:X defined in column 5, “ORF (From-To)”, in Table lA. 17781 A further preferred embodiment is a nucleic acid molecule comprising a nucleotide sequence which is at least 95% identical to the nucleotide sequence of the portion of SEQ ID NO:X defined in columns 8 and 9, “NT From” and “NT To”, respectively, in Table 2.

[0834] A further preferred embodiment is an isolated nucleic acid molecule comprising a nucleotide sequence which is at least 95% identical to the complete nucleotide sequence of SEQ ID NO:X or the complementary strand thereto, the nucleotide sequence as defined in column 5 of Table 1A or columns 8 and 9 of Table 2 or the complementary strand thereto, and/or cDNA contained in Clone ID NO:Z.

[0835] Also preferred is an isolated nucleic acid molecule which hybridizes under stringent hybridization conditions to a nucleic acid molecule comprising a nucleotide sequence of SEQ ID NO:X or the complementary strand thereto, the nucleotide sequence as defined in column 5 of Table 1A or columns 8 and 9 of Table 2 or the complementary strand thereto, and/or cDNA contained in Clone ID NO:Z, wherein said nucleic acid molecule which hybridizes does not hybridize under stringent hybridization conditions to a nucleic acid molecule having a nucleotide sequence consisting of only A residues or of only T residues.

[0836] Also preferred is a composition of matter comprising a DNA molecule which comprises the cDNA contained in Clone ID NO:Z.

[0837] Also preferred is an isolated nucleic acid molecule comprising a nucleotide sequence which is at least 95% identical to a sequence of at least 50 contiguous nucleotides of the cDNA sequence contained in Clone ID NO:Z.

[0838] Also preferred is an isolated nucleic acid molecule, wherein said sequence of at least 50 contiguous nucleotides is included in the nucleotide sequence of an open reading frame sequence encoded by cDNA contained in Clone ID NO:Z.

[0839] Also preferred is an isolated nucleic acid molecule comprising a nucleotide sequence which is at least 95% identical to sequence of at least 150 contiguous nucleotides in the nucleotide sequence encoded by cDNA contained in Clone ID NO:Z.

[0840] A further preferred embodiment is an isolated nucleic acid molecule comprising a nucleotide sequence which is at least 95% identical to sequence of at least 500 contiguous nucleotides in the nucleotide sequence encoded by cDNA contained in Clone ID NO:Z.

[0841] A further preferred embodiment is an isolated nucleic acid molecule comprising a nucleotide sequence which is at least 95% identical to the complete nucleotide sequence encoded by cDNA contained in Clone ID NO:Z.

[0842] A further preferred embodiment is a method for detecting in a biological sample a nucleic acid molecule comprising a nucleotide sequence which is at least 95% identical to a sequence of at least 50 contiguous nucleotides in a sequence selected from the group consisting of: a nucleotide sequence of SEQ ID NO:X or the complementary strand thereto; the nucleotide sequence as defined in column 5 of Table 1A or columns 8 and 9 of Table 2 or the complementary strand thereto; and a nucleotide sequence encoded by cDNA contained in Clone ID NO:Z; which method comprises a step of comparing a nucleotide sequence of at least one nucleic acid molecule in said sample with a sequence selected from said group and determining whether the sequence of said nucleic acid molecule in said sample is at least 95% identical to said selected sequence.

[0843] Also preferred is the above method wherein said step of comparing sequences comprises determining the extent of nucleic acid hybridization between nucleic acid molecules in said sample and a nucleic acid molecule comprising said sequence selected from said group. Similarly, also preferred is the above method wherein said step of comparing sequences is performed by comparing the nucleotide sequence determined from a nucleic acid molecule in said sample with said sequence selected from said group. The nucleic acid molecules can comprise DNA molecules or RNA molecules.

[0844] A further preferred embodiment is a method for identifying the species, tissue or cell type of a biological sample which method comprises a step of detecting nucleic acid molecules in said sample, if any, comprising a nucleotide sequence that is at least 95% identical to a sequence of at least 50 contiguous nucleotides in a sequence selected from the group consisting of: a nucleotide sequence of SEQ ID NO:X or the complementary strand thereto; the nucleotide sequence as defined in column 5 of Table 1A or columns 8 and 9 of Table 2 or the complementary strand thereto; and a nucleotide sequence of the cDNA contained in Clone ID NO:Z.

[0845] The method for identifying the species, tissue or cell type of a biological sample can comprise a step of detecting nucleic acid molecules comprising a nucleotide sequence in a panel of at least two nucleotide sequences, wherein at least one sequence in said panel is at least 95% identical to a sequence of at least 50 contiguous nucleotides in a sequence selected from said group.

[0846] Also preferred is a method for diagnosing in a subject a pathological condition associated with abnormal structure or expression of a nucleotide sequence of SEQ ID NO:X or the complementary strand thereto; the nucleotide sequence as defined in column 5 of Table 1A or columns 8 and 9 of Table 2 or the complementary strand thereto; or the cDNA contained in Clone ID NO:Z which encodes a protein, wherein the method comprises a step of detecting in a biological sample obtained from said subject nucleic acid molecules, if any, comprising a nucleotide sequence that is at least 95% identical to a sequence of at least 50 contiguous nucleotides in a sequence selected from the group consisting of: a nucleotide sequence of SEQ ID NO:X or the complementary strand thereto; the nucleotide sequence as defined in column 5 of Table 1A or columns 8 and 9 of Table 2 or the complementary strand thereto; and a nucleotide sequence of cDNA contained in Clone ID NO:Z.

[0847] The method for diagnosing a pathological condition can comprise a step of detecting nucleic acid molecules comprising a nucleotide sequence in a panel of at least two nucleotide sequences, wherein at least one sequence in said panel is at least 95% identical to a sequence of at least 50 contiguous nucleotides in a sequence selected from said group.

[0848] Also preferred is a composition of matter comprising isolated nucleic acid molecules wherein the nucleotide sequences of said nucleic acid molecules comprise a panel of at least two nucleotide sequences, wherein at least one sequence in said panel is at least 95% identical to a sequence of at least 50 contiguous nucleotides in a sequence selected from the group consisting of: a nucleotide sequence of SEQ ID NO:X or the complementary strand thereto; the nucleotide sequence as defined in column 5 of Table 1A or columns 8 and 9 of Table 2 or the complementary strand thereto; and a nucleotide sequence encoded by cDNA contained in Clone ID NO:Z. The nucleic acid molecules can comprise DNA molecules or RNA molecules.

[0849] Also preferred is a composition of matter comprising isolated nucleic acid molecules wherein the nucleotide sequences of said nucleic acid molecules comprise a DNA microarray or “chip” of at least 1, 2, 3, 4, 5, 6, 7, 8, 9, 10, 15, 20, 25, 30, 40, 50, 100, 150, 200, 250, 300, 500, 1000, 2000, 3000, or 4000 nucleotide sequences, wherein at least one sequence in said DNA microarray or “chip” is at least 95% identical to a sequence of at least 50 contiguous nucleotides in a sequence selected from the group consisting of: a nucleotide sequence of SEQ ID NO:X wherein X is any integer as defined in Table 1A; and a nucleotide sequence encoded by a human cDNA clone identified by a cDNA “Clone ID” in Table 1A.

[0850] Also preferred is an isolated polypeptide comprising an amino acid sequence at least 90% identical to a sequence of at least about 10 contiguous amino acids in the polypeptide sequence of SEQ ID NO:Y; a polypeptide encoded by SEQ ID NO:X or the complementary strand thereto; the polypeptide encoded by the nucleotide sequence as defined in columns 8 and 9 of Table 2; and/or a polypeptide encoded by cDNA contained in Clone ID NO:Z.

[0851] Also preferred is an isolated polypeptide comprising an amino acid sequence at least 95% identical to a sequence of at least about 30 contiguous amino acids in the amino acid sequence of SEQ ID NO:Y; a polypeptide encoded by SEQ ID NO:X or the complementary strand thereto; the polypeptide encoded by the nucleotide sequence as defined in columns 8 and 9 of Table 2; and/or a polypeptide encoded by cDNA contained in Clone ID NO:Z.

[0852] Further preferred is an isolated polypeptide comprising an amino acid sequence at least 95% identical to a sequence of at least about 100 contiguous amino acids in the amino acid sequence of SEQ ID NO:Y; a polypeptide encoded by SEQ ID NO:X or the complementary strand thereto; the polypeptide encoded by the nucleotide sequence as defined in columns 8 and 9 of Table 2; and/or a polypeptide encoded by cDNA contained in Clone ID NO:Z.

[0853] Further preferred is an isolated polypeptide comprising an amino acid sequence at least 95% identical to the complete amino acid sequence of SEQ ID NO:Y; a polypeptide encoded by SEQ ID NO:X or the complementary strand thereto; the polypeptide encoded by the nucleotide sequence as defined in columns 8 and 9 of Table 2; and/or a polypeptide encoded by cDNA contained in Clone ID NO:Z.

[0854] Further preferred is an isolated polypeptide comprising an amino acid sequence at least 90% identical to a sequence of at least about 10 contiguous amino acids in the complete amino acid sequence of a polypeptide encoded by contained in Clone ID NO:Z.

[0855] Also preferred is a polypeptide wherein said sequence of contiguous amino acids is included in the amino acid sequence of a portion of said polypeptide encoded by cDNA contained in Clone ID NO:Z; a polypeptide encoded by SEQ ID NO:X or the complementary strand thereto; the polypeptide encoded by the nucleotide sequence as defined in columns 8 and 9 of Table 2; and/or the polypeptide sequence of SEQ ID NO:Y.

[0856] Also preferred is an isolated polypeptide comprising an amino acid sequence at least 95% identical to a sequence of at least about 30 contiguous amino acids in the amino acid sequence of a polypeptide encoded by the cDNA contained in Clone ID NO:Z.

[0857] Also preferred is an isolated polypeptide comprising an amino acid sequence at least 95% identical to a sequence of at least about 100 contiguous amino acids in the amino acid sequence of a polypeptide encoded by cDNA contained in Clone ID NO:Z.

[0858] Also preferred is an isolated polypeptide comprising an amino acid sequence at least 95% identical to the amino acid sequence of a polypeptide encoded by the cDNA contained in Clone ID NO:Z.

[0859] Further preferred is an isolated antibody which binds specifically to a polypeptide comprising an amino acid sequence that is at least 90% identical to a sequence of at least 10 contiguous amino acids in a sequence selected from the group consisting of: a polypeptide sequence of SEQ ID NO:Y; a polypeptide encoded by SEQ ID NO:X or the complementary strand thereto; the polypeptide encoded by the nucleotide sequence as defined in columns 8 and 9 of Table 2; and a polypeptide encoded by the cDNA contained in Clone ID NO:Z.

[0860] Further preferred is a method for detecting in a biological sample a polypeptide comprising an amino acid sequence which is at least 90% identical to a sequence of at least 10 contiguous amino acids in a sequence selected from the group consisting of: a polypeptide sequence of SEQ ID NO:Y; a polypeptide encoded by SEQ ID NO:X or the complementary strand thereto; the polypeptide encoded by the nucleotide sequence as defined in columns 8 and 9 of Table 2; and a polypeptide encoded by the cDNA contained in Clone ID NO:Z; which method comprises a step of comparing an amino acid sequence of at least one polypeptide molecule in said sample with a sequence selected from said group and determining whether the sequence of said polypeptide molecule in said sample is at least 90% identical to said sequence of at least 10 contiguous amino acids.

[0861] Also preferred is the above method wherein said step of comparing an amino acid sequence of at least one polypeptide molecule in said sample with a sequence selected from said group comprises determining the extent of specific binding of polypeptides in said sample to an antibody which binds specifically to a polypeptide comprising an amino acid sequence that is at least 90% identical to a sequence of at least 10 contiguous amino acids in a sequence selected from the group consisting of: a polypeptide sequence of SEQ ID NO:Y; a polypeptide encoded by SEQ ID NO:X or the complementary strand thereto; the polypeptide encoded by the nucleotide sequence as defined in columns 8 and 9 of Table 2; and a polypeptide encoded by the cDNA contained in Clone ID NO:Z.

[0862] Also preferred is the above method wherein said step of comparing sequences is performed by comparing the amino acid sequence determined from a polypeptide molecule in said sample with said sequence selected from said group.

[0863] Also preferred is a method for identifying the species, tissue or cell type of a biological sample which method comprises a step of detecting polypeptide molecules in said sample, if any, comprising an amino acid sequence that is at least 90% identical to a sequence of at least 10 contiguous amino acids in a sequence selected from the group consisting of: polypeptide sequence of SEQ ID NO:Y; a polypeptide encoded by SEQ ID NO:X or the complementary strand thereto; the polypeptide encoded by the nucleotide sequence as defined in columns 8 and 9 of Table 2; and a polypeptide encoded by the cDNA contained in Clone ID NO:Z.

[0864] Also preferred is the above method for identifying the species, tissue or cell type of a biological sample, which method comprises a step of detecting polypeptide molecules comprising an amino acid sequence in a panel of at least two amino acid sequences, wherein at least one sequence in said panel is at least 90% identical to a sequence of at least 10 contiguous amino acids in a sequence selected from the above group.

[0865] Also preferred is a method for diagnosing in a subject a pathological condition associated with abnormal structure or expression of a nucleic acid sequence identified in Table 1A or Table 2 encoding a polypeptide, which method comprises a step of detecting in a biological sample obtained from said subject polypeptide molecules comprising an amino acid sequence in a panel of at least two amino acid sequences, wherein at least one sequence in said panel is at least 90% identical to a sequence of at least 10 contiguous amino acids in a sequence selected from the group consisting of: polypeptide sequence of SEQ ID NO:Y; a polypeptide encoded by SEQ ID NO:X or the complementary strand thereto; the polypeptide encoded by the nucleotide sequence as defined in columns 8 and 9 of Table 2; and a polypeptide encoded by the cDNA contained in Clone ID NO:Z.

[0866] In any of these methods, the step of detecting said polypeptide molecules includes using an antibody.

[0867] Also preferred is an isolated nucleic acid molecule comprising a nucleotide sequence which is at least 95% identical to a nucleotide sequence encoding a polypeptide wherein said polypeptide comprises an amino acid sequence that is at least 90% identical to a sequence of at least 10 contiguous amino acids in a sequence selected from the group consisting of: polypeptide sequence of SEQ ID NO:Y; a polypeptide encoded by SEQ ID NO:X or the complementary strand thereto; the polypeptide encoded by the nucleotide sequence as defined in columns 8 and 9 of Table 2; and a polypeptide encoded by the cDNA contained in Clone ID NO:Z.

[0868] Also preferred is an isolated nucleic acid molecule, wherein said nucleotide sequence encoding a polypeptide has been optimized for expression of said polypeptide in a prokaryotic host.

[0869] Also preferred is a polypeptide molecule, wherein said polypeptide comprises an amino acid sequence selected from the group consisting of: polypeptide sequence of SEQ ID NO:Y; a polypeptide encoded by SEQ ID NO:X or the complementary strand thereto; the polypeptide encoded by the nucleotide sequence as defined in columns 8 and 9 of Table 2; and a polypeptide encoded by the cDNA contained in Clone ID NO:Z.

[0870] Further preferred is a method of making a recombinant vector comprising inserting any of the above isolated nucleic acid molecule into a vector. Also preferred is the recombinant vector produced by this method. Also preferred is a method of making a recombinant host cell comprising introducing the vector into a host cell, as well as the recombinant host cell produced by this method.

[0871] Also preferred is a method of making an isolated polypeptide comprising culturing this recombinant host cell under conditions such that said polypeptide is expressed and recovering said polypeptide. Also preferred is this method of making an isolated polypeptide, wherein said recombinant host cell is a eukaryotic cell and said polypeptide is a human protein comprising an amino acid sequence selected from the group consisting of: polypeptide sequence of SEQ ID NO:Y; a polypeptide encoded by SEQ ID NO:X or the complementary strand thereto; the polypeptide encoded by the nucleotide sequence as defined in columns 8 and 9 of Table 2; and a polypeptide encoded by the cDNA contained in Clone ID NO:Z. The isolated polypeptide produced by this method is also preferred.

[0872] Also preferred is a method of treatment of an individual in need of an increased level of a protein activity, which method comprises administering to such an individual a Therapeutic comprising an amount of an isolated polypeptide, polynucleotide, immunogenic fragment or analogue thereof, binding agent, antibody, or antigen binding fragment of the claimed invention effective to increase the level of said protein activity in said individual.

[0873] Also preferred is a method of treatment of an individual in need of a decreased level of a protein activity, which method comprised administering to such an individual a Therapeutic comprising an amount of an isolated polypeptide, polynucleotide, immunogenic fragment or analogue thereof, binding agent, antibody, or antigen binding fragment of the claimed invention effective to decrease the level of said protein activity in said individual.

[0874] Also preferred is a method of treatment of an individual in need of a specific delivery of toxic compositions to diseased cells (e.g., tumors, leukemias or lymphomas), which method comprises administering to such an individual a Therapeutic comprising an amount of an isolated polypeptide of the invention, including, but not limited to a binding agent, or antibody of the claimed invention that are associated with toxin or cytotoxic prodrugs.

[0875] Having generally described the invention, the same will be more readily understood by reference to the following examples, which are provided by way of illustration and are not intended as limiting.

TABLE 6

| ATCC Deposits | Deposit Date | ATCC Designation Number |
|---|---|---|
| LP01, LP02, LP03, | May-20-97 | 209059, 209060, 209061, 209062, |
| LP04, LP05, LP06, | | 209063, 209064, 209065, 209066, |
| LP07, LP08, LP09, | | 209067, 209068, 209069 |
| LP10, LP11, | | |
| LP12 | Jan-12-98 | 209579 |
| LP13 | Jan-12-98 | 209578 |
| LP14 | Jul-16-98 | 203067 |
| LP15 | Jul-16-98 | 203068 |
| LP16 | Feb-1-99 | 203609 |
| LP17 | Feb-1-99 | 203610 |
| LP20 | Nov-17-98 | 203485 |
| LP21 | Jun-18-99 | PTA-252 |
| LP22 | Jun-18-99 | PTA-253 |
| LP23 | Dec-22-99 | PTA-1081 |

### EXAMPLES

### Example 1

### Isolation of a Selected cDNA Clone from the Deposited Sample

[0876] Each Clone ID NO:Z is contained in a plasmid vector. Table 7 identifies the vectors used to construct the cDNA library from which each clone was isolated. In many cases, the vector used to construct the library is a phage vector from which a plasmid has been excised. The following correlates the related plasmid for each phage vector used in constructing the cDNA library. For example, where a particular clone is identified in Table 7 as being isolated in the vector “Lambda Zap,” the corresponding deposited clone is in “pBluescript.”

| Vector Used to Construct Library | Corresponding Deposited Plasmid |
|---|---|
| Lambda Zap | pBluescript (pBS) |
| Uni-Zap XR | pBluescript (pBS) |
| Zap Express | pBK |
| lafmid BA | plafmid BA |
| pSport1 | pSport1 |
| pCMVSport 2.0 | pCMVSport 2.0 |
| pCMVSport 3.0 | pCMVSport 3.0 |
| pCR ® 2.1 | pCR ® 2.1 |

[0877] Vectors Lambda Zap (U.S. Pat. Nos. 5,128,256 and 5,286,636), Uni-Zap XR (U.S. Pat. Nos. 5,128, 256 and 5,286,636), Zap Express (U.S. Pat. Nos. 5,128,256 and 5,286,636), pBluescript (pBS) (Short, J. M. et al., Nucleic Acids Res. 16:7583-7600 (1988); Alting-Mees, M. A. and Short, J. M., Nucleic Acids Res. 17:9494 (1989)) and pBK (Alting-Mees, M. A. et al., Strategies 5:58-61 (1992)) are commercially available from Stratagene Cloning Systems, Inc., 11011 N. Torrey Pines Road, La Jolla, Calif., 92037. pBS contains an ampicillin resistance gene and pBK contains a neomycin resistance gene. Both can be transformed into E. coli strain XL-1 Blue, also available from Stratagene. pBS comes in 4 forms SK+, SK−, KS+ and KS. The S and K refers to the orientation of the polylinker to the T7 and T3 primer sequences which flank the polylinker region (“S” is for SacI and “K” is for KpnI which are the first sites on each respective end of the linker). “+” or “−” refer to the orientation of the fl origin of replication (“ori”), such that in one orientation, single stranded rescue initiated from the f1 ori generates sense strand DNA and in the other, antisense.

[0878] Vectors pSport1, pCMVSport 2.0 and pCMVSport 3.0, were obtained from Life Technologies, Inc., P. O. Box 6009, Gaithersburg, Md. 20897. All Sport vectors contain an ampicillin resistance gene and may be transformed into E. coli strain DH10B, also available from Life Technologies. (See, for instance, Gruber, C. E., et al., Focus 15:59 (1993)). Vector lafmid BA (Bento Soares, Columbia University, NY) contains an ampicillin resistance gene and can be transformed into E. coli strain XL-1 Blue. Vector pCR®2.1, which is available from Invitrogen, 1600 Faraday Avenue, Carlsbad, Calif. 92008, contains an ampicillin resistance gene and may be transformed into E. coli strain DH10B, available from Life Technologies. (See, for instance, Clark, J. M., Nuc. Acids Res. 16:9677-9686 (1988) and Mead, D. et al., Bio/Technology 9: (1991)). Preferably; a polynucleotide of the present invention does not comprise the phage vector sequences identified for the particular clone in Table 7, as well as the corresponding plasmid vector sequences designated above.

[0879] The deposited material in the sample assigned the ATCC Deposit Number cited by reference to Tables 1, 2, 6 and 7 for any given cDNA clone also may contain one or more additional plasmids, each comprising a cDNA clone different from that given clone. Thus, deposits sharing the same ATCC Deposit Number contain at least a plasmid for each Clone ID NO:Z.

TABLE 7

| | | | ATCC |
|---|---|---|---|
| Libraries owned by Catalog | Catalog Description | Vector | Deposit |
| HUKA HUKB HUKC HUKD HUKE | Human Uterine Cancer | Lambda ZAP II | LP01 |
| HUKF HUKG | | | |
| HCNA HCNB | Human Colon | Lambda Zap II | LP01 |
| HFFA | Human Fetal Brain, random primed | Lambda Zap II | LP01 |
| HTWA | Resting T-Cell | Lambda ZAP II | LP01 |
| HBQA | Early Stage Human Brain, random | Lambda ZAP II | LP01 |
| | primed | | |
| HLMB HLMF HLMG HLMH HLMI | breast lymph node CDNA library | Lambda ZAP II | LP01 |
| HLMJ HLMM HLMN | | | |
| HCQA HCQB | human colon cancer | Lamda ZAP II | LP01 |
| HMEA HMEC HMED HMEE HMEF | Human Microvascular Endothelial | Lambda ZAP II | LP01 |
| HMEG HMEI HMEJ HMEK HMEL | Cells, fract. A | | |
| HUSA HUSC | Human Umbilical Vein Endothelial | Lambda ZAP II | LP0l |
| | Cells, fract. A | | |
| HLQA HLQB | Hepatocellular Tumor | Lambda ZAP II | LP01 |
| HHGA HHGB HHGC HHGD | Hemangiopericytoma | Lambda ZAP II | LP01 |
| HSDM | Human Striatum Depression, re- | Lambda ZAP II | LP01 |
| | rescue | | |
| HUSH | H Umbilical Vein Endothelial Cells, | Lambda ZAP II | LP01 |
| | frac A, re-excision | | |
| HSGS | Salivary gland, subtracted | Lambda ZAP II | LP01 |
| HFXA HFXB HFXC HFXD HFXE | Brain frontal cortex | Lambda ZAP II | LP01 |
| HFXF HFXG HFXH | | | |
| HPQA HPQB HPQC | PERM TF274 | Lambda ZAP II | LP01 |
| HFXJ HFXK | Brain Frontal Cortex, re-excision | Lambda ZAP II | LP01 |
| HCWA HCWB HCWC HCWD HCWE | CD34 positive cells (Cord Blood) | ZAP Express | LP02 |
| HCWF HCWG HCWH HCWI HCWJ | | | |
| HCWK | | | |
| HCUA HCUB HCUC | CD34 depleted Buffy Coat (Cord | ZAP Express | LP02 |
| | Blood) | | |
| HRSM | A-14 cell line | ZAP Express | LP02 |
| HRSA | A1-CELL LINE | ZAP Express | LP02 |
| HCUD HCUE HCUF HCUG HCUH | CD34 depleted Buffy Coat (Cord | ZAP Express | LP02 |
| HCUI | Blood), re-excision | | |
| HBXE HBXF HBXG | H. Whole Brain #2, re-excision | ZAP Express | LP02 |
| HRLM | L8 cell line | ZAP Express | LP02 |
| HBXA HBXB HBXC HBXD | Human Whole Brain #2 - Oligo dT> | ZAP Express | LP02 |
| | 1.5 Kb | | |
| HUDA HUDB HUDC | Testes | ZAP Express | LP02 |
| HHTM HHTN HHTO | H. hypothalamus, frac A; re-excision | ZAP Express | LP02 |
| HHTL | H. hypothalamus, frac A | ZAP Express | LP02 |
| HASA HASD | Human Adult Spleen | Uni-ZAP XR | LP03 |
| HFKC HFKD HFKE HFKF HFKG | Human Fetal Kidney | Uni-ZAP XR | LP03 |
| HE8A HE8B HE8C HE8D HE8E HE8F | Human 8 Week Whole Embryo | Uni-ZAP XR | LP03 |
| HE8M HE8N | | | |
| HGBA HGBD HGBE HGBF HGBG | Human Gall Bladder | Uni-ZAP XR | LP03 |
| HGBH HGBI | | | |
| HLHA HLHB HLHC HLHD HLHE | Human Fetal Lung III | Uni-ZAP XR | LP03 |
| HLHF HLHG HLHH HLHQ | | | |
| HPMA HPMB HPMC HPMD HPME | Human Placenta | Uni-ZAP XR | LP03 |
| HPMF HPMG HPMH | | | |
| HPRA HPRB HPRC HPRD | Human Prostate | Uni-ZAP XR | LP03 |
| HSIA HSIC HSID HSIE | Human Adult Small Intestine | Uni-ZAP XR | LP03 |
| HTEA HTEB HTEC HTED HTEE | Human Testes | Uni-ZAP XR | LP03 |
| HTEF HTEG HTEH HIEI HTEJ HTEK | | | |
| HTPA HTPB HTPC HTPD HTPE | Human Pancreas Tumor | Uni-ZAP XR | LP03 |
| HTTA HTTB HTTC HTTD HTYE | Human Testes Tumor | Uni-ZAP XR | LP03 |
| HTTF | | | |
| HAPA HAPB HAPC HAPM | Human Adult Pulmonary | Uni-ZAP XR | LP03 |
| HETA HETB HETC HETD HETE | Human Endometrial Tumor | Uni-ZAP XR | LP03 |
| HETF HETG HETH HETI | | | |
| HHFB HHFC HHFD HHFE HHFF | Human Fetal Heart | Uni-ZAP XR | LP03 |
| HHFG HHFH HHFI | | | |
| HHPB HHPC HHPD HHPE HHPF | Human Hippocampus | Uni-ZAP XR | LP03 |
| HHPG HHPH | | | |
| HCE1 HCE2 HCE3 HCE4 HCE5 HCEB | Human Cerebellum | Uni-ZAP XR | LP03 |
| HCEC HCED HCEE HCEF HCEG | | | |
| HUVB HUVC HUVD HUVE | Human Umbilical Vein, Endo. | Uni-ZAP XR | LP03 |
| | remake | | |
| HSTA HSTB HSTC HSTD | Human Skin Tumor | Uni-ZAP XR | LP03 |
| HTAA HTAB HTAC HTAD HTAE | Human Activated T-Cells | Uni-ZAP XR | LP03 |
| HFEA HFEB HFEC | Human Fetal Epithelium (Skin) | Uni-ZAP XR | LP03 |
| HJPA HJPB HJPC HJPD | HUMAN JURKAT MEMBRANE | Uni-ZAP XR | LP03 |
| | BOUND POLYSOMES | | |
| HESA | Human epithelioid sarcoma | Uni-Zap XR | LP03 |
| HLTA HLTB HLTC HLTD HLTE | Human T-Cell Lymphoma | Uni-ZAP XR | LP03 |
| HLTF | | | |
| HFTA HFTB UFTC HFTD | Human Fetal Dura Mater | Uni-ZAP XR | LP03 |
| HRDA HRDB HRDC HRDD HRDE | Human Rhabdomyosarcoma | Uni-ZAP XR | LP03 |
| HRDF | | | |
| HCAA HCAB HCAC | Cem cells cyclohexamide treated | Uni-ZAP XR | LP03 |
| HRGA HRGB HRGC HRGD | Raji Cells, cyclohexamide treated | Uni-ZAP XR | LP03 |
| HSUA HSUB HSUC HSUM | Supt Cells, cyclohexamide treated | Uni-ZAP XR | LP03 |
| HT4A HT4C HT4D | Activated T-Cells, 12 hrs. | Uni-ZAP XR | LP03 |
| HE9A HE9B HE9C HE9D HE9E HE9F | Nine Week Old Early Stage Human | Uni-ZAP XR | LP03 |
| HE9G HE9H HE9M HE9N | | | |
| HATA HATB HATC HATD HATE | Human Adrenal Gland Tumor | Uni-ZAP XR | LP03 |
| HT5A | Activated T-Cells, 24 hrs. | Uni-ZAP XR | LP03 |
| HFGA HFGM | Human Fetal Brain | Uni-ZAP XR | LP03 |
| HNEA HNEB HNEC HNED HNEE | Human Neutrophil | Uni-ZAP XR | LP03 |
| HBGB HBGD | Human Primary Breast Cancer | Uni-ZAP XR | LP03 |
| HBNA HBNB | Human Normal Breast | Uni-ZAP XR | LP03 |
| HCAS | Cem Cells, cyclohexamide treated, | Uni-ZAP XR | LP03 |
| | subtra | | |
| HHPS | Human Hippocampus, subtracted | pBS | LP03 |
| HKCS HKCU | Human Colon Cancer, subtracted | pBS | LP03 |
| HRGS | Raji cells, cyclohexamide treated, | pBS | LP03 |
| | subtracted | | |
| HSUT | Supt cells, cyclohexamide treated, | pBS | LP03 |
| | differentially expressed | | |
| HT4S | Activated T-Cells, 12 hrs, subtracted | Uni-ZAP XR | LP03 |
| HCDA HCDB HCDC HCDD HCDE | Human Chondrosarcoma | Uni-ZAP XR | LP03 |
| HOAA HOAB HOAC | Human Osteosarcoma | Uni-ZAP XR | LP03 |
| HTLA HTLB HTLC HTLD HTLE | Human adult testis, large inserts | Uni-ZAP XR | LP03 |
| HTLF | | | |
| HLMA HLMC HLMD | Breast Lymph node cDNA library | Uni-ZAP XR | LP03 |
| H6EA H6EB H6EC | HL-60, PMA 4H | Uni-ZAP XR LP03 | |
| HTXA HTXB HTXC HTXD HTXE | Activated T-Cell (l2 hs)/Thiouridine | Uni-ZAP XR | LP03 |
| HTXF HTXG HTXH | labelledEco | | |
| HNFA HNFB HNFC HNFD HNFE | Human Neutrophil, Activated | Uni-ZAP XR | LP03 |
| HNFF HNFG HNFH HNFJ | | | |
| HTOB HTOC | HUMAN TONSILS, FRACTION 2 | Uni-ZAP XR | LP03 |
| HMGB | Human OB MG63 control fraction I | Uni-ZAP XR | LP03 |
| HOPB | Human OB HOS control fraction I | Uni-ZAP XR | LP03 |
| HORB | Human OB HOS treated (10 nM E2) | Uni-ZAP XR | LP03 |
| | fraction I | | |
| HSVA HSVB HSVC | Human Chronic Synovitis | Uni-ZAP XR | LP03 |
| HROA | HUMAN STOMACH | Uni-ZAP XR | LP03 |
| HBJA HBJB HBJC HBJD HBJE HBJF | HUMAN B CELL LYMPHOMA | Uni-ZAP XR | LP03 |
| HBJG HBJH HBJI HBJJ HBJK | | | |
| HCRA HCRB HCRC | human corpus colosum | Uni-ZAP XR | LP03 |
| HODA HODB HODC HODD | human ovarian cancer | Uni-ZAP XR | LP03 |
| HDSA | Dermatofibrosarcoma Protuberance | Uni-ZAP XR | LP03 |
| HMWA HMWB HMWC HMWD | Bone Marrow Cell Line (RS4;11) | Uni-ZAP XR | LP03 |
| HMWE HMWF HMWG HMWH | | | |
| HMWI HMWJ | | | |
| HSOA | stomach cancer (human) | Uni-ZAP XR | LP03 |
| HERA | SKIN | Uni-ZAP XR | LP03 |
| HMDA | Brain-medulloblastoma | Uni-ZAP XR | LP03 |
| HGLA HGLB HGLD | Glioblastoma | Uni-ZAP XR | LP03 |
| HEAA | H. Atrophic Endometrium | Uni-ZAP XR | LP03 |
| HBCA HBCB | H. Lymph node breast Cancer | Uni-ZAP XR | LP03 |
| HPWT | Human Prostate BPH, re-excision | Uni-ZAP XR | LP03 |
| HFVG HFVH HFVI | Fetal Liver, subtraction II | pBS | LP03 |
| HNFI | Human Neutrophils, Activated, re- | pBS | LP03 |
| | excision | | |
| HBMB HBMC HBMD | Human Bone Marrow, re-excision | pBS | LP03 |
| HKML HKMM HKMN | H. Kidney Medulla, re-excision | pBS | LP03 |
| HKIX HKIY | H. Kidney Cortex, subtracted | pBS | LP03 |
| HADT | H. Amygdala Depression, subtracted | pBS | LP03 |
| H6AS | Hl-60, untreated, subtracted | Uni-ZAP XR | LP03 |
| H6ES | HL-60, PMA 4H, subtracted | Uni-ZAP XR | LP03 |
| H6BS | HL-60, RA 4h, Subtracted | Uni-ZAP XR | LP03 |
| H6CS | HL-60, PMA 1d, subtracted | Uni-ZAP XR | LP03 |
| HTXJ HTXK | Activated T-cell(12 h)/Thiouridine-re- | Uni-ZAP XR | LP03 |
| | excision | | |
| HMSA HMSB HMSC HMSD HMSE | Monocyte activated | Uni-ZAP XR | LP03 |
| HMSF HMSG HMSH HMSI HMSJ | | | |
| HMSK | | | |
| HAGA HAGB HAGC HAGD HAGE | Human Amygdala | Uni-ZAP XR | LP03 |
| HAGF | | | |
| HSRA HSRB HSRE | STROMAL-OSTEOCLASTOMA | Uni-ZAP XR | LP03 |
| HSRD HSRF HSRG HSRH | Human Osteoclastoma Stromal Cells - | Uni-ZAP XR | LP03 |
| | unamplified | | |
| HSQA HSQB HSQC HSQD HSQE | Stromal cell TF274 | Uni-ZAP XR | LP03 |
| HSQF HSQG | | | |
| HSKA HSKB HSKC HSKD HSKE | Smooth muscle, serum treated | Uni-ZAP XR | LP03 |
| HSKF HSKZ | | | |
| HSLA HSLB HSLC HSLD HSLE HSLF | Smooth muscle, control | Uni-ZAP XR | LP03 |
| HSLG | | | |
| HSDA HSDD HSDE HSDF HSDG | Spinal cord | Uni-ZAP XR | LP03 |
| HSDH | | | |
| HPWS | Prostate-BPH subtracted II | pBS | LP03 |
| HSKW HSKX HSKY | Smooth Muscle-HASTE normalized | pBS | LP03 |
| HFPB HFPC HFPD | H. Frontal cortex, epileptic; re-excision | Uni-ZAP XR | LP03 |
| HSDI HSDJ HSDK | Spinal Cord, re-excision | Uni-ZAP XR | LP03 |
| HSKN HSKO | Smooth Muscle Serum Treated, Norm | pBS | LP03 |
| HSKG HSKH HSKI | Smooth muscle, serum induced,re-exc | pBS | LP03 |
| HFCA HFCB HFCC HFCD HFCE | Human Fetal Brain | Uni-ZAP XR | LP04 |
| HFCF | | | |
| HPTA HPTB HPTD | Human Pituitaiy | Uni-ZAP XR | LP04 |
| HTHB HTHC HTHD | Human Thymus | Uni-ZAP XR | LP04 |
| HE6B HE6C HE6D HE6E HE6F HE6G | Human Whole Six Week Old Embryo | Uni-ZAP XR | LP04 |
| HE6S | | | |
| HSSA HSSB HSSC HSSD HSSE HSSF | Human Synovial Sarcoma | Uni-ZAP XR | LP04 |
| HSSG HSSH HSSI HSSJ HSSK | | | |
| HE7T | 7 Week Old Early Stage Human, | Uni-ZAP XR | LP04 |
| | subtracted | | |
| HEPA HEPB HEPC | Human Epididymus | Uni-ZAP XR | LP04 |
| HSNA HSNB HSNC HSNM HSNN | Human Synovium | Uni-ZAP XR | LP04 |
| HPFB HPFC HPFD HPFE | Human Prostate Cancer, Stage C | Uni-ZAP XR | LP04 |
| | fraction | | |
| HE2A HE2D HE2E HE2H HE2I HE2M | 12 Week Old Early Stage Human | Uni-ZAP XR | LP04 |
| HE2N HE2O | | | |
| HE2B HE2C HE2F HE2G HE2P HE2Q | 12 Week Old Early Stage Human, II | Uni-ZAP XR | LP04 |
| HPTS HPTT HPTU | Human Pituitary, subtracted | Uni-ZAP XR | LP04 |
| HAUA HAUB HAUC | Amniotic Cells - TNF induced | Uni-ZAP XR | LP04 |
| HAQA HAQB HAQC HAQD | Amniotic Cells - Primary Culture | Uni-ZAP XR | LP04 |
| HWTA HWTB HWTC | wilm's tumor | Uni-ZAP XR | LP04 |
| HBSD | Bone Cancer, re-excision | Uni-ZAP XR | LP04 |
| HSGB | Salivary gland, re-excision | Uni-ZAP XR | LP04 |
| HSJA HSJB HSJC | Smooth muscle-ILb induced | Uni-ZAP XR | LP04 |
| HSXA HSXB HSXC HSXD | Human Substantia Nigra | Uni-ZAP XR | LP04 |
| HSHA HSHB HSHC | Smooth muscle, IL1b induced | Uni-ZAP XR | LP04 |
| HOUA HOUB HOUC HOUD HOUE | Adipocytes | Uni-ZAP XR | LP04 |
| HPWA HPWB HPWC HPWD HPWE | Prostate BPH | Uni-ZAP XR | LP04 |
| HELA HELB HELC HELD HELE | Endothelial cells-control | Uni-ZAP XR | LP04 |
| HELF HELG HELH | | | |
| HEMA HEMB HEMC HEMD HEME | Endothelial-induced | Uni-ZAP XR | LP04 |
| HEMF HEMG HEMH | | | |
| HBIA HBIB HBIC | Human Brain, Striatum | Uni-ZAP XR | LP04 |
| HHSA HHSB HHSC HHSD HHSE | Human Hypothalmus, Schizophrenia | Uni-ZAP XR | LP04 |
| HNGA HNGB HNGC HNGD HNGE | neutrophils control | Uni-ZAP XR | LP04 |
| HNGF HNGG HNGH HNGI HNGJ | | | |
| HNHA HNHB HNHC HNHD HNHE | Neutrophils IL-1 and LPS induced | Uni-ZAP XR | LP04 |
| HNHF HNHG HNHH HNHI HNHJ | | | |
| HSDB HSDC | STRIATUM DEPRESSION | Uni-ZAP XR | LP04 |
| HHPT | Hypothalamus | Uni-ZAP XR | LP04 |
| HSAT HSAU HSAV HSAW HSAX | Anergic T-cell | Uni-ZAP XR | LP04 |
| HSAY HSAZ | | | |
| HBMS HBMT HBMU HBMV HBMW | Bone marrow | Uni-ZAP XR | LP04 |
| HBMX | | | |
| HOEA HOEB HOEC HOED HOBE | Osteoblasts | Uni-ZAP XR | LP04 |
| HOEF HOEJ | | | |
| HAIA HAIB HAIC HAID HAIE HAIF | Epithelial-TNFa and TNF induced | Uni-ZAP XR | LP04 |
| HTGA HTGB HTGC HTGD | Apoptotic T-cell | Uni-ZAP XR LP04 | |
| HMCA HMCB HMCC HMCD HMCE | Macrophage-oxLDL | Uni-ZAP XR | LP04 |
| HMAA HMAB HMAC HMAD HMAE | Macrophage (GM-CSF treated) | Uni-ZAP XR | LP04 |
| HMAF HMAG | | | |
| HPHA | Normal Prostate | Uni-ZAP XR | LP04 |
| HPIA HPIB HPIC | LNCAP prostate cell line | Uni-ZAP XR | LP04 |
| HPJA HPJB HPJC | PC3 Prostate cell line | Uni-ZAP XR | LP04 |
| HOSE HOSF HOSG | Human Osteoclastoma, re-excision | Uni-ZAP XR | LP04 |
| HTGE HTGF | Apoptotic T-cell, re-excision | Uni-ZAP XR | LP04 |
| HMAJ HMAK | H Macrophage (GM-CSF treated), re- | Uni-ZAP XR | LP04 |
| | excision | | |
| HACB HACC HACD | Human Adipose Tissue, re-excision | Uni-ZAP XR | LP04 |
| HFPA | H. Frontal Cortex, Epileptic | Uni-ZAP XR | LP04 |
| HFAA HFAB HFAC HFAD HFAE | Alzheimer's, spongy change | Uni-ZAP XR | LP04 |
| HFAM | Frontal Lobe, Dementia | Uni-ZAP XR | LP04 |
| HMIA HMIB HMIC | Human Manic Depression Tissue | Uni-ZAP XR | LP04 |
| HTSA HTSE HTSF HTSG HTSH | Human Thymus | pBS | LP05 |
| HPBA HPBB HPBC HPBD HPBE | Human Pineal Gland | pBS | LP05 |
| HSAA HSAB HSAC | HSA 172 Cells | pBS | LP05 |
| HSBA HSBB HSBC HSBM | HSC172 cells | pBS | LP05 |
| HJAA HJAB HJAC HJAD | Jurkat T-cell G1 phase | pBS | LP05 |
| HJBA HJBB HJBC HJBD | Jurkat T-Cell, S phase | pBS | LP05 |
| HAFA HAFB | Aorta endothelial cells + TNF-a | pBS | LP05 |
| HAWA HAWB HAWC | Human White Adipose | pBS | LP05 |
| HTNA HTNB | Human Thyroid | pBS | LP05 |
| HONA | Normal Ovary, Premenopausal | pBS | LP05 |
| HARA HARB | Human Adult Retina | pBS | LP05 |
| HLJA HUB | Human Lung | pCMVSport 1 | LP06 |
| HOFM HOFN HOFO | H. Ovarian Tumor, II, OV5232 | pCMVSport 2.0 | LP07 |
| HOGA HOGB HOGC | OV 10-3-95 | pCMVSport 2.0 | LP07 |
| HCGL | CD34 + cells, II | pCMVSport 2.0 | LP07 |
| HDLA | Hodgkin's Lymphoma I | pCMVSport 2.0 | LP07 |
| HDTA HDTB HDTC HDTD HDTE | Hodgkin's Lymphoma II | pCMVSport 2.0 | LP07 |
| HKAA HKAB HKAC HKAD HKAE | Keratinocyte | pCMVSport2.0 | LP07 |
| HKAF HKAG HKAH | | | |
| HCIM | CAPPINDER, Crohn's Disease, lib 2 | pCMVSport 2.0 | LP07 |
| HKAL | Keratinocyte, lib 2 | pCMVSport2.0 | LP07 |
| HKAT | Keratinocyte, lib 3 | pCMVSport2.0 | LP07 |
| HNDA | Nasal polyps | pCMVSport2.0 | LP07 |
| HDRA | H. Primary Dendritic Cells, lib 3 | pCMVSport2.0 | LP07 |
| HOHA HOHB HOHC | Human Osteoblasts II | pCMVSport2.0 | LP07 |
| HLDA HLDB HLDC | Liver, Hepatoma | pCMVSport3.0 | LP08 |
| HLDN HLDO HLDP | Human Liver, normal | pCMVSport3.0 | LP08 |
| HMTA | pBMC stimulated w/ poly I/C | pCMVSport3.0 | LP08 |
| HNTA | NTERA2, control | pCMVSport3.OLP08 | |
| HDPA HDPB HDPC HDPD HDPF | Primary Dendritic Cells, lib 1 | pCMVSport3.0 | LP08 |
| HDPG HDPH HDPI HDPJ HDPK | | | |
| HDPM HDPN HDPO HDPP | Primary Dendritic cells, frac 2 | pCMVSport3.0 | LP08 |
| HMUA HMUB HMUC | Myoloid Progenitor Cell Line | pCMVSport3.0 | LP08 |
| HHEA HHEB HHEC HHED | T Cell helper I | pCMVSport3.0 | LP08 |
| HHEM HHEN HHFO HHEP | T cell helper II | pCMVSport3.0 | LP08 |
| HEQA HEQB HEQC | Human endometrial stromal cells | pCMVSport3.0 | LP0S |
| HJMA HJMB | Human endometrial stromal cells- | pCMVSport3.0 | LP08 |
| | treated with progesterone | | |
| HSWA HSWB HSWC | Human endometrial stromal cells- | pCMVSport3.0 | LP08 |
| | treated with estradiol | | |
| HSYA HSYB HSYC | Human Thymus Stromal Cells | pCMVSport3.0 | LP08 |
| HLWA HLWB HLWC | Human Placenta | pCMVSport3.0 | LP08 |
| HRAA HRAB HRAC | Rejected Kidney, lib 4 | pCMVSport3.0 | LP08 |
| HMTM | PCR, pBMC I/C treated | PCRII | LP09 |
| HMJA | H. Meniingima, M6 | pSport 1 | LP10 |
| HMKA HMKB HMKC HMKD HMKE | H. Meningima, M1 | pSport 1 | LP10 |
| HUSG HUSI | Human umbilical vein endothelial | pSport 1 | LP10 |
| | cells, IL-4 induced | | |
| HUSX HUSY | Human Umbilical Vein Endothelial | pSport 1 | LP10 |
| | Cells, uninduced | | |
| HOFA | Ovarian Tumor I, OV5232 | pSport 1 | LP10 |
| HCFA HCFB HCFC HCFD | T-Cell PHA 16 hrs | pSport 1 | LP10 |
| HCFL HCFM HCFN HCFO | T-Cell PHA 24 hrs | pSport 1 | LP10 |
| HADA HADC HADD HADE HADF | Human Adipose | pSport 1 | LP10 |
| HADG | | | |
| HOVA HOVB HOVC | Human Ovary | pSport 1 | LP10 |
| HTWB HTWC HTWD HTWE HTWF | Resting T-Cell Library, II | pSport 1 | LP10 |
| HMMA | Spleen metastic melanoma | pSport 1 | LP10 |
| HLYA HLYB HLYC HLYD HLYE | Spleen, Chronic lymphocytic | pSport 1 | LP10 |
| | leukemia | | |
| HCGA | CD34 + cell, I | pSport 1 | LP10 |
| HEOM HEON | Human Eosinophils | pSport 1 | LP10 |
| HTDA | Human Tonsil, Lib 3 | pSport 1 | LP10 |
| HSPA | Salivary Gland, Lib 2 | pSport 1 | LP10 |
| HCHA HCHB HCHC | Breast Cancer cell line, MDA 36 | pSport 1 | LP10 |
| HCHM HCHN | Breast Cancer Cell line, angiogenic | pSport 1 | LP10 |
| HCIA | Crohn's Disease | pSport 1 | LP10 |
| HDAA HDAB HDAC | HEL cell line | pSport 1 | LP10 |
| HABA | Human Astrocyte | pSport 1 | LP10 |
| HUFA HIJFB HUFC | Ulcerative Colitis | pSport 1 | LP10 |
| HNTM | NTERA2 + retinoic acid, 14 days | pSport 1 | LP10 |
| HDQA | Primary Dendritic cells, CapFinder2, | pSport 1 | LP10 |
| | frac 1 | | |
| HDQM | Primary Dendritic Cells, CapFinder, | pSport 1 | LP10 |
| | frac 2 | | |
| HLDX | Human Liver, normal, CapFinder | pSport 1 | LP10 |
| HULA HULB HULC | Human Dermal Endothelial | pSport1 | LP10 |
| | Cells, untreated | | |
| HUMA | Human Dermal Endothelial | pSport1 | LP10 |
| | cells, treated | | |
| HCJA | Human Stromal Endometrial | pSport1 | LP10 |
| | fibroblasts, untreated | | |
| HCJM | Human Stromal endometrial | pSport1 | LP10 |
| | fibroblasts, treated w/ estradiol | | |
| HEDA | Human Stromal endometrial | pSport1 | LP10 |
| | fibroblasts, treated with progesterone | | |
| HFNA | Human ovary tumor cell OV350721 | pSport1 | LP10 |
| HKGA HKGB HKGC HKGD | Merkel Cells | pSport1 | LP10 |
| HISA HISB HISC | Pancreas Islet Cell Tumor | pSport1 | LP10 |
| HLSA | Skin, burned | pSport1 | LP10 |
| HBZA | Prostate, BPH, Lib 2 | pSport1 | LP 10 |
| HBZS | Prostate BPH, Lib 2, subtracted | pSport1 | LP10 |
| HFIA HFIB HFIC | Synovial Fibroblasts (control) | pSport1 | LP10 |
| HFIH HEII HFIJ | Synovial hypoxia | pSport1 | LP 10 |
| HFIT HFIU HFIV | Synovial IL-1/TNF stimulated | pSport1 | LP10 |
| HGCA | Messangial cell, frac 1 | pSport1 | LP10 |
| HMVA HMVB HMVC | Bone Marrow Stromal Cell, untreated | pSport1 | LP10 |
| HEIX HETY HFIZ | Synovial Fibroblasts (III/TNF), subt | pSport1 | LP10 |
| HFOX HFOY HFOZ | Synovial hypoxia-RSF subtracted | pSport1 | LP10 |
| HMQA HMQB HMQC HMQD | Human Activated Monocytes | Uni-ZAP XR | LP11 |
| HLIA HUB HLIC | Human Liver | pCMVSport 1 | LP012 |
| HHBA HHBB HHBC HHBD HHBE | Human Heart | pCMVSport 1 | LP012 |
| HBBA HBBB | Human Brain | pCMVSport 1 | LP012 |
| HLJA HLJB HLJC HLJD HLJE | Human Lung | pCMVSport 1 | LP012 |
| HOGA HOGB HOGC | Ovarian Tumor | pCMVSport 2.0 | LP012 |
| HTJM | Human Tonsils, Lib 2 | pCMVSport 2.0 | LP012 |
| HAMF HAMG | KMH2 | pCMVSport 3.0 | LP012 |
| HAJA HAJB HAJC | L428 | pCMVSport 3.0 | LP012 |
| HWBA HWBB HWBC HWBD HWBE | Dendritic cells, pooled | pCMVSport 3.0 | LP012 |
| HWAA HWAB HWAC HWAD HWAE | Human Bone Marrow, treated | pCMVSport 3.0 | LP012 |
| HYAA HYAB HYAC | B Cell lymphoma | pCMVSport 3.0 | LP012 |
| HWHG HWHH HWHI | Healing groin wound, 6.5 hours post | pCMVSport 3.0 | LP012 |
| | incision | | |
| HWHP HWHQ HWHR | Healing groin wound; 7.5 hours post | pCMVSport 3.0 | LP012 |
| | incision | | |
| HARM | Healing groin wound - zero hr post- | pCMVSport 3.0 | LP012 |
| | incision (control) | | |
| HBIM | Olfactory epithelium; nasalcavity | pCMVSport 3.0 | LP012 |
| HWDA | Healing Abdomen wound; 70&90 | pCMVSport 3.0 | LP012 |
| | min post incision | | |
| HWEA | Healing Abdomen Wound; 15 days | pCMVSport 3.0 | LP012 |
| | post incision | | |
| HWJA | Healing Abdomen Wound; 21&29 | pCMVSport 3.0 | LP012 |
| | days | | |
| HNAL | Human Tongue, frac 2 | pSport1 | LP012 |
| HMJA | H. Meniingima, M6 | pSport1 | LP012 |
| HMKA HMKB HMKC HMKD HMKE | H. Meningima, M1 | pSport1 | LP012 |
| HOFA | Ovarian Tumor I, OV5232 | pSport1 | LP012 |
| HCFA HCFB HCFC HCFD | T-Cell PHA 16 hrs | pSport1 | LP012 |
| HCFL HCFM HCFN HCFO | T-Cell PHA 24 hrs | pSport1 | LP012 |
| HMMA HMMB HMMC | Spleen metastic melanoma | pSport1 | LP012 |
| HTDA | Human Tonsil, Lib 3 | pSport1 | LP012 |
| HDBA | Human Fetal Thymus | pSport1 | LP012 |
| HDUA | Pericardium | pSport1 | LP012 |
| HBZA | Prostate, BPH, Lib 2 | pSport1 | LP012 |
| HWCA | Larynx tumor | pSport1 | LP012 |
| HWKA | Normal lung | pSport1 | LP012 |
| HSMB | Bone marrow stroma, treated | pSport1 | LP012 |
| HBHM | Normal trachea | pSport1 | LP012 |
| HLFC | Human Larynx | pSport1 | LP012 |
| HLRB | Siebben Polyposis | pSport1 | LP012 |
| HNIA | Mammary Gland | pSport1 | LP012 |
| HNJB | Palate carcinoma | pSport1 | LP012 |
| HNKA | Palate normal | pSport1 | LP012 |
| HMZA | Pharynx carcinoma | pSport1 | LP012 |
| HABG | Cheek Carcinoma | pSport1 | LP012 |
| HMZM | Pharynx Carcinoma | pSport1 | LP012 |
| HDRM | Larynx Carcinoma | pSport1 | LP012 |
| HVAA | Pancreas normal PCA4 No | pSport1 | LP012 |
| HICA | Tongue carcinoma | pSport1 | LP012 |
| HUKA HUKB HUKC HUKD HUKE | Human Uterine Cancer | Lambda ZAP II | LP013 |
| HFFA | Human Fetal Brain, random primed | Lambda ZAP II | LP013 |
| HTUA | Activated T-cell labeled with 4- | Lambda ZAP II | LP013 |
| | thioluri | | |
| HBQA | Early Stage Human Brain, random | Lambda ZAP II | LP013 |
| | primed | | |
| HMEB | Human microvascular Endothelial | Lambda ZAP II | LP013 |
| | cells, fract. B | | |
| HUSH | Human Umbilical Vein Endothelial | Lambda ZAP II | LP013 |
| | cells, fract. A, re-excision | | |
| HLQC HLQD | Hepatocellular tumor, re-excision | Lambda ZAP II | LP013 |
| HTWJ HTWK HTWL | Resting T-cell, re-excision | Lambda ZAP II | LP013 |
| HF6S | Human Whole 6 week Old Embryo | pBluescript | LP013 |
| | (II), subt | | |
| HHPS | Human Hippocampus, subtracted | pBluescript | LP013 |
| HL1S | LNCAP, differential expression | pBluescript | LP013 |
| HLHS HLHT | Early Stage Human Lung, Subtracted | pBluescript | LP013 |
| HSUS | Supt cells, cyclohexamide treated, | pBluescript | LP013 |
| | subtracted | | |
| HSUT | Supt cells, cyclohexamide treated, | pBluescript | LP013 |
| | differentially expressed | | |
| HSDS | H. Striatum Depression, subtracted | pBluescript | LP013 |
| HPTZ | Human Pituitary, Subtracted VII | pBluescript | LP013 |
| HSDX | H. Striatum Depression, subt II | pBluescript | LP013 |
| HSDZ | H. Striatum Depression, subt | pBluescript | LP013 |
| HPBA HPBB HPBC HPBD HPBE | Human Pineal Gland | pBluescript SK- | LP013 |
| HRTA | Colorectal Tumor | pBluescript SK- | LP013 |
| HSBA HSBB HSBC HSBM | H5C172 cells | pBluescript SK- | LP013 |
| HJAA HJAB HJAC HJAD | Jurkat T-cell G1 phase | pBluescript SK- | LP013 |
| HJBA HJBB HJBC HJBD | Jurkat T-cell, S1 phase | pBluescript SK- | LP013 |
| HTNA HTNB | Human Thyroid | pBluescript SK- | LP013 |
| HAHA HAHB | Human Adult Heart | Uni-ZAP XR | LP013 |
| HE6A | Whole 6 week Old Embryo | Uni-ZAP XR | LP013 |
| HFCA HFCB HFCC HFCD HFCE | Human Fetal Brain | Uni-ZAP XR | LP013 |
| HEKC HFKD HFKE HFKF HFKG | Human Fetal Kidney | Uni-ZAP XR | LP013 |
| HGBA HGBD HGBE HGBF HGBG | Human Gall Bladder | Uni-ZAP XR | LP013 |
| HPRA HPRB HPRC HPRD | Human Prostate | Uni-ZAP XR | LP013 |
| HTEA HTEB HTEC HTED HTEE | Human Testes | Uni-ZAP XR | LP013 |
| HTTA HTTB HTTC HTTD HTTE | Human Testes Tumor | Uni-ZAP XR | LP013 |
| HYBA HYBB | Human Fetal Bone | Uni-ZAP XR | LP013 |
| HFLA | Human Fetal Liver | Uni-ZAP XR | LP0l3 |
| HHFB HHFC HHFD HHFE HHFF | Human Fetal Heart | Uni-ZAP XR | LP013 |
| HUVB HUVC HUVD HUVE | Human Umbilical Vein, End. remake | Uni-ZAP XR | LP013 |
| HTHB HTHC HTHD | Human Thymus | Uni-ZAP XR | LP013 |
| HSTA HSTB HSTC HSTD | Human Skin Tumor | Uni-ZAP XR | LP013 |
| HTAA HTAB HTAC HTAD HTAE | Human Activated T-cells | Uni-ZAP XR | LP013 |
| HFEA HFEB HFEC | Human Fetal Epithelium (skin) | Uni-ZAP XR | LP013 |
| HJPA HJPB HJPC HJPD | Human Jurkat Membrane Bound | Uni-ZAP XR | LP013 |
| | Polysomes | | |
| HESA | Human Epithelioid Sarcoma | Uni-ZAP XR | LP013 |
| HALS | Human Adult Liver, Subtracted | Uni-ZAP XR | LP013 |
| HFTA HFTB HFTC HFTD | Human Fetal Dura Mater | Uni-ZAP XR | LP013 |
| HCAA HCAB HCAC | Cem cells, cyclohexamide treated | Uni-ZAP XR | LP013 |
| HRGA HRGB HRGC HRGD | Raji Cells, cyclohexamide treated | Uni-ZAP XR | LP013 |
| HE9A HE9B HE9C HE9D HE9E | Nine Week Old Early Stage Human | Uni-ZAP XR | LP013 |
| HSFA | Human Fibrosarcoma | Uni-ZAP XR | LP013 |
| HATA HATB HATC HATD HATE | Human Adrenal Gland Tumor | Uni-ZAP XR | LP013 |
| HTRA | Human Trachea Tumor | Uni-ZAP XR | LP013 |
| HE2A HE2D HE2E HE2H HE2I | 12 Week Old Early Stage Human | Uni-ZAP XR | LP013 |
| HE2B HE2C HE2F HE2G HE2P | 12 Week Old Early Stage Human, II | Uni-ZAP XR | LP013 |
| HNEA HNEB HNEC HNED HNEE | Human Neutrophil | Uni-ZAP XR | LP013 |
| HBGA | Human Primary Breast Cancer | Uni-ZAP XR | LP013 |
| HPTS HPTT HPTU | Human Pituitary, subtracted | Uni-ZAP XR | LP013 |
| HMQA HMQB HMQC HMQD | Human Activated Monocytes | Uni-ZAP XR | LP013 |
| HOAA HOAB HOAC | Human Osteosarcoma | Uni-ZAP XR | LP013 |
| HTOA HTOD HTOE HTOF HTOG | human tonsils | Uni-ZAP XR | LP013 |
| HMGB | Human OB MG63 control fraction I | Uni-ZAP XR | LP013 |
| HOPB | Human OB HOS control fraction I | Uni-ZAP XR | LP013 |
| HOQB | Human OB HOS treated (1 nM E2) | Uni-ZAP XR | LP013 |
| | fraction 1 | | |
| HAUA HAUB HAUC | Amniotic Cells - TNF induced | Uni-ZAP XR | LP013 |
| HAQA HAQB HAQC HAQD | Amniotic Cells - Primary Culture | Uni-ZAP XR | LP013 |
| HROA HROC | HUMAN STOMACH | Uni-ZAP XR | LP0l3 |
| HBJA HBJB HBJC HBJD HBJE | HUMAN B CELL LYMPHOMA | Uni-ZAP XR | LP013 |
| HODA HODB HODC HODD | human ovarian cancer | Uni-ZAP XR | LP013 |
| HCPA | Corpus Callosum | Uni-ZAP XR | LP013 |
| HSOA | stomach cancer (human) | Uni-ZAP XR | LP013 |
| HERA | SKIN | Uni-ZAP XR | LP013 |
| HMDA | Brain-medulloblastoma | Uni-ZAP XR | LP013 |
| HGLA HGLB HGLD | Glioblastoma | Uni-ZAP XR | LP013 |
| HWTA HWTB HWTC | wilm's tumor | Uni-ZAP XR | LP013 |
| HEAA | H. Atrophic Endometrium | Uni-ZAP XR | LP013 |
| HAPN HAPO HAPP HAPQ HAPR | Human Adult Pulmonary; re-excision | Uni-ZAP XR | LP013 |
| HLTG HLTH | Human T-cell lymphoma; re-excision | Uni-ZAP XR | LP013 |
| HAHC HAHD HAHE | Human Adult Heart; re-excision | Uni-ZAP XR | LP013 |
| HAGA HAGB HAGC HAGD HAGE | Human Amygdala | Uni-ZAP XR | LP013 |
| HSJA HSJB HSJC | Smooth muscle-ILb induced | Uni-ZAP XR | LP013 |
| HSHA HSHB HSHC | Smooth muscle, IL1b induced | Uni-ZAP XR | LP013 |
| HPWA HPWB HPWC HPWD HPWE | Prostate BPH | Uni-ZAP XR | LP013 |
| HPIA HPIB HPIC | LNCAP prostate cell line | Uni-ZAP XR | LP013 |
| HPJA HPJB HPJC | PC3 Prostate cell line | Uni-ZAP XR | LP013 |
| HBTA | Bone Marrow Stroma, TNF&LPS ind | Uni-ZAP XR | LP013 |
| HMCF HMCG HMCH HMCI HMCJ | Macrophage-oxLDL; re-excision | Uni-ZAP XR | LP013 |
| HAGG HAGH HAGI | Human Amygdala; re-excision | Uni-ZAP XR | LP013 |
| HACA | H. Adipose Tissue | Uni-ZAP XR | LP013 |
| HKFB | K562 + PMA (36 hrs),re-excision | ZAP Express | LP013 |
| HCWT HCWU HCWV | CD34 positive cells (cord blood), re- | ZAP Express | LP013 |
| | ex | | |
| HBWA | Whole brain | ZAP Express | LP013 |
| HBXA HBXB HBXC HBXD | Human Whole Brain #2- Oligo dT> | ZAP Express | LP013 |
| | 1.5 Kb | | |
| HAVM | Temporal cortex-AlzheizMer | pT-Adv | LP014 |
| HAVT | Hippocampus, Alzheimer Subtracted | pT-Adv | LP014 |
| HHAS | CHME Cell Line | Uni-ZAP XR | LP014 |
| HAJR | Larynx normal | pSport 1 | LP014 |
| HWLE HWLF HWLG HWLH | Colon Normal | pSport 1 | LP014 |
| HCRM HCRN HCRO | Colon Carcinoma | pSport 1 | LP014 |
| HWLI HWLJ HWLK | Colon Normal | pSport 1 | LP014 |
| HWLQ HWLR HWLS HWLT | Colon Tumor | pSport 1 | LP014 |
| HBFM | Gastrocnemius Muscle | pSport 1 | LP014 |
| HBOD HBOE | Quadriceps Muscle | pSport 1 | LP014 |
| HBKD HBKE | Soleus Muscle | pSport 1 | LP014 |
| HCCM | Pancreatic Langerhans | pSport 1 | LP014 |
| HWGA | Larynx carcinoma | pSport 1 | LP014 |
| HWGM HWGN | Larynx carcinoma | pSport 1 | LP014 |
| HWLA HWLB HWLC | Normal colon | pSport 1 | LP014 |
| HWLM HWLN | Colon Tumor | pSport 1 | LP014 |
| HVAM HVAN HVAO | Pancreas Tumor | pSport 1 | LP014 |
| HWGQ | Larynx carcinoma | pSport 1 | LP014 |
| HAQM HAQN | Salivary Gland | pSport 1 | LP014 |
| HASM | Stomach; normal | pSport 1 | LP014 |
| HBCM | Uterus; normal | pSport 1 | LP014 |
| HCDM | Testis; normal | pSport 1 | LP014 |
| HDJM | Brain; normal | pSport 1 | LP014 |
| HEFM | Adrenal Gland, normal | pSport 1 | LP014 |
| HBAA | Rectum normal | pSport 1 | LP014 |
| HFDM | Rectum tumour | pSport 1 | LP014 |
| HGAM | Colon, normal | pSport 1 | LP014 |
| HHMM | Colon, tumour | pSport 1 | LP014 |
| HCLB HCLC | Human Lung Cancer | Lambda Zap II | LP015 |
| HRLA | L1 Cell line | ZAP Express | LP015 |
| HHAM | Hypothalamus, Alzheimer's | pCMVSport 3.0 | LP015 |
| HKBA | Ku 812F Basophils Line | pSport 1 | LP015 |
| HS2S | Saos2, Dexamethosome Treated | pSport 1 | LP016 |
| HA5A | Lung Carcinoma A549 TNFalpha | pSport 1 | LP016 |
| | activated | | |
| HTFM | IF-1 Cell Line GM-CSF Treated | pSport 1 | LP016 |
| HYAS | Thyroid Tumour | pSport 1 | LP016 |
| HUTS | Larynx Normal | pSport 1 | LP016 |
| HXOA | Larynx Tumor | pSport 1 | LP016 |
| HEAH | Ea.hy.926 cell line | pSport 1 | LP016 |
| HINA | Adenocarcinoma Human | pSport 1 | LP016 |
| HRMA | Lung Mesothelium | pSport 1 | LP016 |
| HLCL | Human Pre-Differentiated Adipocytes | Uni-Zap XR | LP017 |
| HS2A | Saos2 Cells | pSport 1 | LP020 |
| HS2I | Saos2 Cells; Vitamin D3 Treated | pSport 1 | LP020 |
| HUCM | CHME Cell Line, untreated | pSport 1 | LP020 |
| HEPN | Aryepiglottis Normal | pSport 1 | LP020 |
| HPSN | Sinus Piniformis Tumour | pSport 1 | LP020 |
| HNSA | Stomach Normal | pSport 1 | LP020 |
| HNSM | Stomach Tumour | pSport 1 | LP020 |
| HNLA | Liver Normal Met5No | pSport 1 | LP020 |
| HUTA | Liver Tumour Met 5 Tu | pSport 1 | LP020 |
| HOCN | Colon Normal | pSport 1 | LP020 |
| HOCT | Colon Tumor | pSport 1 | LP020 |
| HTNT | Tongue Tumour | pSport 1 | LP020 |
| HLXN | Larynx Normal | pSport 1 | LP020 |
| HLXT | Larynx Tumour | pSport 1 | LP020 |
| HTYN | Thymus | pSport 1 | LP020 |
| HPLN | Placenta | pSport 1 | LP020 |
| HTNG | Tongue Normal | pSport 1 | LP020 |
| HZAA | Thyroid Normal (SDCA2 No) | pSport 1 | LP020 |
| HWES | Thyroid Thyroiditis | pSport 1 | LP020 |
| HFHD | Ficolled Human Stromal Cells, 5Fu | pTrip1Ex2 | LP021 |
| | treated | | |
| HFHM, HFHN | Ficolled Human Stromal Cells, | pTrip1Ex2 | LP021 |
| | Untreated | | |
| HPCI | Hep G2 Cells, lambda library | lambda Zap-CMV XR | LP021 |
| HBCA, HBCB, HBCC | H. Lymph node breast Cancer | Uni-ZAP XR | LP021 |
| HCOK | Chondrocytes | pSPORT1 | LP022 |
| HDCA, HDCB, HDCC | Dendritic Cells From CD34 Cells | pSPORT1 LP022 | |
| HDMA, HDMB | CD40 activated monocyte dendritic | pSPORT1 | LP022 |
| | cells | | |
| HDDM, HDDN, HDDO | LPS activated derived dendritic cells | pSPORT1 | LP022 |
| HPCR | Hep G2 Cells, PCR library | lambda Zap-CMV XR | LP022 |
| HAAA, HAAB, HAAC | Lung, Cancer (4005313A3): Invasive | pSPORT1 | LP022 |
| | Poorly Differentiated Lung | | |
| | Adenocarcinoma | | |
| HIPA, HIPB, HIPC | Lung, Cancer (4005163 B7): | pSPORT1 | LP022 |
| | Invasive, Poorly Diff. | | |
| | Adenocarcinoma, Metastatic | | |
| HOOH, HOOI | Ovary, Cancer: (4004562 B6) | pSPORT1 | LP022 |
| | Papillary Serous Cystic Neoplasm, | | |
| | Low Malignant Pot | | |
| HIDA | Lung, Normal: (4005313 B1) | pSPORT1 | LP022 |
| HUJA, HUJB, HUJC, HUJD, HUJE | B-Cells | pCMVSport 3.0 | LP022 |
| HNOA, HNOB, HNOC, HNOD | Ovary, NormaL: (9805C040R) | pSPORT1 | LP022 |
| HNLM | Lung, Normal: (4005313 B1) | pSPORT1 | LP022 |
| HSCL | Stromal Cells | pSPORTl | LPO22 |
| HAAX | Lung, Cancer: (4005313 A3) Invasive | pSPORT1 | LP022 |
| | Poorly-differentiated Metastatic lung | | |
| | adenocarcinoma | | |
| HUUA, HUUB, HUUC, HUUD | B-cells (unstimulated) | pTrip1Ex2 | LP022 |
| HWWA, HWWB, HWWC, HWWD, HW | B-cells (stimulated) | pSPORT1 | LP022 |
| WE, HWWF, HWWG | | | |
| HCCC | Colon, Cancer: (9808C064R) | pCMvSport 3.0 | LP023 |
| HPDO HPDP HPDQ HPDR HPD | Ovary, Cancer (9809C332): Poorly | pSport 1 | LP023 |
| | differentiated adenocarcinoma | | |
| HPCO HPCP HPCQ HPCT | Ovary, Cancer (15395A1F): Grade II | pSport 1 | LP023 |
| | Papillary Carcinoma | | |
| HOCM HOCO HOCP HOCQ | Ovary, Cancer: (15799A1F) Poorly | pSport 1 | LP023 |
| | differentiated carcinoma | | |
| HCBM HCBN HCBO | Breast, Cancer: (4004943 A5) | pSport 1 | LP023 |
| HNBT HNBU HNBV | Breast, Normal: (4005522B2) | pSport 1 | LP023 |
| HBCP HBCQ | Breast, Cancer: (4005522 A2) | pSport 1 | LP023 |
| HBCJ | Breast, Cancer: (9806C012R) | pSport 1 | LP023 |
| HSAM HSAN | Stromal cells 3.88 | pSport 1 | LP023 |
| HVCA HVCB HVCC HVCD | Ovary, Cancer: (4004332 A2) | pSport 1 | LP023 |
| HSCK HSEN HSEO | Stromal cells (HBM3.18) | pSport 1 | LP023 |
| HSCP HSCQ | stromal cell clone 2.5 | pSport 1 | LP023 |
| HUXA | Breast Cancer: (4005385 A2) | pSport 1 | LP023 |
| HCOM HCON HCOO HCOP HCOQ | Ovary, Cancer (4004650 A3): Well- | pSport 1 | LP023 |
| | Differentiated Micropapillary Serous | | |
| | Carcinoma | | |
| HBNM | Breast, Cancer: (9802C020E) | pSport 1 | LP023 |
| HVVA HVVB HVVC HVVD HVVE | Human Bone Marrow, treated | pSport 1 | LP023 |

[0880] Two nonlimiting examples are provided below for isolating a particular clone from the deposited sample of plasmid cDNAs cited for that clone in Table 7. First, a plasmid is directly isolated by screening the clones using a polynucleotide probe corresponding to the nucleotide sequence of SEQ ID NO:X.

[0881] Particularly, a specific polynucleotide with 30-40 nucleotides is synthesized using an Applied Biosystems DNA synthesizer according to the sequence reported. The oligonucleotide is labeled, for instance, with ³²P-γ-ATP using T4 polynucleotide kinase and purified according to routine methods. (E.g., Maniatis et al., Molecular Cloning: A Laboratory Manual, Cold Spring Harbor Press, Cold Spring, N.Y. (1982)). The plasmid mixture is transformed into a suitable host, as indicated above (such as XL-1 Blue (Stratagene)) using techniques known to those of skill in the art, such as those provided by the vector supplier or in related publications or patents cited above. The transformants are plated on 1.5% agar plates (containing the appropriate selection agent, e.g., ampicillin) to a density of about 150 transformants (colonies) per plate. These plates are screened using Nylon membranes according to routine methods for bacterial colony screening (e.g., Sambrook et al., Molecular Cloning: A Laboratory Manual, 2nd Edit., (1989), Cold Spring Harbor Laboratory Press, pages 1.93 to 1.104), or other techniques known to those of skill in the art.

[0882] Alternatively, two primers of 17-20 nucleotides derived from both ends of the nucleotide sequence of SEQ ID NO:X are synthesized and used to amplify the desired cDNA using the deposited cDNA plasmid as a template. The polymerase chain reaction is carried out under routine conditions, for instance, in 25 μl of reaction mixture with 0.5 ug of the above cDNA template. A convenient reaction mixture is 1.5-5 mM MgCl₂, 0.01% (w/v) gelatin, 20 μM each of dATP, dCTP, dGTP, dTTP, 25 pmol of each primer and 0.25 Unit of Taq polymerase. Thirty five cycles of PCR (denaturation at 94° C. for 1 min; annealing at 55° C. for 1 min; elongation at 72° C. for 1 min) are performed with a Perkin-Elmer Cetus automated thermal cycler. The amplified product is analyzed by agarose gel electrophoresis and the DNA band with expected molecular weight is excised and purified. The PCR product is verified to be the selected sequence by subcloning and sequencing the DNA product.

[0883] Several methods are available for the identification of the 5′ or 3′ non-coding portions of a gene which may not be present in the deposited clone. These methods include but are not limited to, filter probing, clone enrichment using specific probes, and protocols similar or identical to 5′ and 3′ “RACE” protocols which are well known in the art. For instance, a method similar to 5′ RACE is available for generating the missing 5′ end of a desired full-length transcript. (Fromont-Racine et al., Nucleic Acids Res. 21(7):1683-1684 (1993)).

[0884] Briefly, a specific RNA oligonucleotide is ligated to the 5′ ends of a population of RNA presumably containing full-length gene RNA transcripts. A primer set containing a primer specific to the ligated RNA oligonucleotide and a primer specific to a known sequence of the gene of interest is used to PCR amplify the 5′ portion of the desired full-length gene. This amplified product may then be sequenced and used to generate the full length gene.

[0885] This above method starts with total RNA isolated from the desired source, although poly-A+ RNA can be used. The RNA preparation can then be treated with phosphatase if necessary to eliminate 5′ phosphate groups on degraded or damaged RNA which may interfere with the later RNA ligase step. The phosphatase should then be inactivated and the RNA treated with tobacco acid pyrophosphatase in order to remove the cap structure present at the 5′ ends of messenger RNAs. This reaction leaves a 5′ phosphate group at the 5′ end of the cap cleaved RNA which can then be ligated to an RNA oligonucleotide using T4 RNA ligase.

[0886] This modified RNA preparation is used as a template for first strand cDNA synthesis using a gene specific oligonucleotide. The first strand synthesis reaction is used as a template for PCR amplification of the desired 5′ end using a primer specific to the ligated RNA oligonucleotide and a primer specific to the known sequence of the gene of interest. The resultant product is then sequenced and analyzed to confirm that the 5′ end sequence belongs to the desired gene.

### Example 2

### Isolation of Genomic Clones Corresponding to a Polynucleotide

[0887] A human genomic P1 library (Genomic Systems, Inc.) is screened by PCR using primers selected for the sequence corresponding to SEQ ID NO:X according to the method described in Example 1. (See also, Sambrook.)

### Example 3

### Tissue Specific Expression Analysis

[0888] The Human Genome Sciences, Inc. (HGS) database is derived from sequencing tissue and/or disease specific cDNA libraries. Libraries generated from a particular tissue are selected and the specific tissue expression pattern of EST groups or assembled contigs within these libraries is determined by comparison of the expression patterns of those groups or contigs within the entire database. ESTs and assembled contigs which show tissue specific expression are selected.

[0889] The original clone from which the specific EST sequence was generated, or in the case of an assembled contig, the clone from which the 5′ most EST sequence was generated, is obtained from the catalogued library of clones and the insert amplified by PCR using methods known in the art. The PCR product is denatured and then transferred in 96 or 384 well format to a nylon membrane (Schleicher and Scheull) generating an array filter of tissue specific clones. Housekeeping genes, maize genes, and known tissue specific genes are included on the filters. These targets can be used in signal normalization and to validate assay sensitivity. Additional targets are included to monitor probe length and specificity of hybridization.

[0890] Radioactively labeled hybridization probes are generated by first strand cDNA synthesis per the manufacturer's instructions (Life Technologies) from mRNA/RNA samples prepared from the specific tissue being analyzed (e.g., prostate, prostate cancer, ovarian, ovarian cancer, etc.). The hybridization probes are purified by gel exclusion chromatography, quantitated, and hybridized with the array filters in hybridization bottles at 65° C. overnight. The filters are washed under stringent conditions and signals are captured using a Fuji phosphorimager.

[0891] Data is extracted using AIS software and following background subtraction, signal normalization is performed. This includes a normalization of filter-wide expression levels between different experimental runs. Genes that are differentially expressed in the tissue of interest are identified.

### Example 4

### Chromosomal Mapping of the Polynucleotides

[0892] An oligonucleotide primer set is designed according to the sequence at the 5′ end of SEQ ID NO:X. This primer preferably spans about 100 nucleotides. This primer set is then used in a polymerase chain reaction under the following set of conditions: 30 seconds, 95° C.; 1 minute, 56° C.; 1 minute, 70° C. This cycle is repeated 32 times followed by one 5 minute cycle at 70° C. Human, mouse, and hamster DNA is used as template in addition to a somatic cell hybrid panel containing individual chromosomes or chromosome fragments (Bios, Inc). The reactions are analyzed on either 8% polyacrylamide gels or 3.5% agarose gels. Chromosome mapping is determined by the presence of an approximately 100 bp PCR fragment in the particular somatic cell hybrid.

### Example 5

### Bacterial Expression of a Polypeptide

[0893] A polynucleotide encoding a polypeptide of the present invention is amplified using PCR oligonucleotide primers corresponding to the 5′ and 3′ ends of the DNA sequence, as outlined in Example 1, to synthesize insertion fragments. The primers used to amplify the cDNA insert should preferably contain restriction sites, such as BamHI and XbaI, at the 5′ end of the primers in order to clone the amplified product into the expression vector. For example, BamHI and XbaI correspond to the restriction enzyme sites on the bacterial expression vector pQE-9. (Qiagen, Inc., Chatsworth, Calif.). This plasmid vector encodes antibiotic resistance (Amp^{r}), a bacterial origin of replication (ori), an IPTG-regulatable promoter/operator (P/O), a ribosome binding site (RBS), a 6-histidine tag (6-His), and restriction enzyme cloning sites.

[0894] The pQE-9 vector is digested with BamHI and XbaI and the amplified fragment is ligated into the pQE-9 vector maintaining the reading frame initiated at the bacterial RBS. The ligation mixture is then used to transform the E. coli strain M15/rep4 (Qiagen, Inc.) which contains multiple copies of the plasmid pREP4, which expresses the lacI repressor and also confers kanamycin resistance (Kan^{r}). Transformants are identified by their ability to grow on LB plates and ampicillin/kanamycin resistant colonies are selected. Plasmid DNA is isolated and confirmed by restriction analysis.

[0895] Clones containing the desired constructs are grown overnight (O/N) in liquid culture in LB media supplemented with both Amp (100 ug/ml) and Kan (25 ug/ml). The O/N culture is used to inoculate a large culture at a ratio of 1:100 to 1:250. The cells are grown to an optical density 600 (O.D.⁶⁰⁰) of between 0.4 and 0.6. IPTG (Isopropyl-B-D-thiogalacto pyranoside) is then added to a final concentration of 1 mM. IPTG induces by inactivating the lacI repressor, clearing the P/O leading to increased gene expression.

[0896] Cells are grown for an extra 3 to 4 hours. Cells are then harvested by centrifugation (20 mins at 6000× g). The cell pellet is solubilized in the chaotropic agent 6 Molar Guanidine HCl by stirring for 3-4 hours at 4° C. The cell debris is removed by centrifugation, and the supernatant containing the polypeptide is loaded onto a nickel-nitrilo-tri-acetic acid (“Ni-NTA”) affinity resin column (available from QIAGEN, Inc., supra). Proteins with a 6× His tag bind to the Ni-NTA resin with high affinity and can be purified in a simple one-step procedure (for details see: The QIAexpressionist (1995) QIAGEN, Inc., supra).

[0897] Briefly, the supernatant is loaded onto the column in 6 M guanidine-HCl, pH 8. The column is first washed with 10 volumes of 6 M guanidine-HCl, pH 8, then washed with 10 volumes of 6 M guanidine-HCl pH 6, and finally the polypeptide is eluted with 6 M guanidine-HCl, pH 5.

[0898] The purified protein is then renatured by dialyzing it against phosphate-buffered saline (PBS) or 50 mM Na-acetate, pH 6 buffer plus 200 mM NaCl. Alternatively, the protein can be successfully refolded while immobilized on the Ni-NTA column. The recommended conditions are as follows: renature using a linear 6M-1M urea gradient in 500 mM NaCl, 20% glycerol, 20 mM Tris/HCl pH 7.4, containing protease inhibitors. The renaturation should be performed over a period of 1.5 hours or more. After renaturation the proteins are eluted by the addition of 250 mM immidazole. Immidazole is removed by a final dialyzing step against PBS or 50 mM sodium acetate pH 6 buffer plus 200 mM NaCl. The purified protein is stored at 4° C. or frozen at −80° C.

[0899] In addition to the above expression vector, the present invention further includes an expression vector, called pHE4a (ATCC Accession Number 209645, deposited on Feb. 25, 1998) which contains phage operator and promoter elements operatively linked to a polynucleotide of the present invention, called pHE4a. (ATCC Accession Number 209645, deposited on Feb. 25, 1998.) This vector contains: 1) a neomycinphosphotransferase gene as a selection marker, 2) an E. coli origin of replication, 3) a T5 phage promoter sequence, 4) two lac operator sequences, 5) a Shine-Delgarno sequence, and 6) the lactose operon repressor gene (lacIq). The origin of replication (oriC) is derived from pUC19 (LTI, Gaithersburg, Md.). The promoter and operator sequences are made synthetically.

[0900] DNA can be inserted into the pHE4a by restricting the vector with NdeI and XbaI, BamHI, XhoI, or Asp718, running the restricted product on a gel, and isolating the larger fragment (the stuffer fragment should be about 310 base pairs). The DNA insert is generated according to the PCR protocol described in Example 1, using PCR primers having restriction sites for NdeI (5′ primer) and Xbal, BamHI, XhoI, or Asp718 (3′ primer). The PCR insert is gel purified and restricted with compatible enzymes. The insert and vector are ligated according to standard protocols.

[0901] The engineered vector could easily be substituted in the above protocol to express protein in a bacterial system.

### Example 6

### Purification of a Polypeptide from an Inclusion Body

[0902] The following alternative method can be used to purify a polypeptide expressed in E coli when it is present in the form of inclusion bodies. Unless otherwise specified, all of the following steps are conducted at 4-10° C.

[0903] Upon completion of the production phase of the E. coli fermentation, the cell culture is cooled to 4-10° C. and the cells harvested by continuous centrifugation at 15,000 rpm (Heraeus Sepatech). On the basis of the expected yield of protein per unit weight of cell paste and the amount of purified protein required, an appropriate amount of cell paste, by weight, is suspended in a buffer solution containing 100 mM Tris, 50 mM EDTA, pH 7.4. The cells are dispersed to a homogeneous suspension using a high shear mixer.

[0904] The cells are then lysed by passing the solution through a microfluidizer (Microfuidics, Corp. or APV Gaulin, Inc.) twice at 4000-6000 psi. The homogenate is then mixed with NaCl solution to a final concentration of 0.5 M NaCl, followed by centrifugation at 7000× g for 15 min. The resultant pellet is washed again using 0.5M NaCl, 100 mM Tris, 50 mM EDTA, pH 7.4.

[0905] The resulting washed inclusion bodies are solubilized with 1.5 M guanidine hydrochloride (GuHCl) for 2-4 hours. After 7000× g centrifugation for 15 min., the pellet is discarded and the polypeptide containing supernatant is incubated at 4° C. overnight to allow further GuHCl extraction.

[0906] Following high speed centrifugation (30,000× g) to remove insoluble particles, the GuHCl solubilized protein is refolded by quickly mixing the GuHCl extract with 20 volumes of buffer containing 50 mM sodium, pH 4.5, 150 mM NaCl, 2 mM EDTA by vigorous stirring. The refolded diluted protein solution is kept at 4° C. without mixing for 12 hours prior to further purification steps.

[0907] To clarify the refolded polypeptide solution, a previously prepared tangential filtration unit equipped with 0.16 μm membrane filter with appropriate surface area (e.g., Filtron), equilibrated with 40 mM sodium acetate, pH 6.0 is employed. The filtered sample is loaded onto a cation exchange resin (e.g., Poros HS-50, Perseptive Biosystems). The column is washed with 40 mM sodium acetate, pH 6.0 and eluted with 250 mM, 500 mM, 1000 mM, and 1500 mM NaCl in the same buffer, in a stepwise manner. The absorbance at 280 nm of the effluent is continuously monitored. Fractions are collected and further analyzed by SDS-PAGE.

[0908] Fractions containing the polypeptide are then pooled and mixed with 4 volumes of water. The diluted sample is then loaded onto a previously prepared set of tandem columns of strong anion (Poros HQ-50, Perseptive Biosystems) and weak anion (Poros CM-20, Perseptive Biosystems) exchange resins. The columns are equilibrated with 40 mM sodium acetate, pH 6.0. Both columns are washed with 40 mM sodium acetate, pH 6.0, 200 mM NaCl. The CM-20 column is then eluted using a 10 column volume linear gradient ranging from 0.2 M NaCl, 50 mM sodium acetate, pH 6.0 to 1.0 M NaCl, 50 mM sodium acetate, pH 6.5. Fractions are collected under constant A₂₈₀ monitoring of the effluent. Fractions containing the polypeptide (determined, for instance, by 16% SDS-PAGE) are then pooled.

[0909] The resultant polypeptide should exhibit greater than 95% purity after the above refolding and purification steps. No major contaminant bands should be observed from Commassie blue stained 16% SDS-PAGE gel when 5 μg of purified protein is loaded. The purified protein can also be tested for endotoxin/LPS contamination, and typically the LPS content is less than 0.1 ng/ml according to LAL assays.

### Example 7

### Cloning and Expression of a Polypeptide in a Baculovirus Expression System

[0910] In this example, the plasmid shuttle vector pA2 is used to insert a polynucleotide into a baculovirus to express a polypeptide. This expression vector contains the strong polyhedrin promoter of the Autographa californica nuclear polyhedrosis virus (AcMNPV) followed by convenient restriction sites such as BamHI, XbaI and Asp718. The polyadenylation site of the simian virus 40 (“SV40”) is used for efficient polyadenylation. For easy selection of recombinant virus, the plasmid contains the beta-galactosidase gene from E. coli under control of a weak Drosophila promoter in the same orientation, followed by the polyadenylation signal of the polyhedrin gene. The inserted genes are flanked on both sides by viral sequences for cell-mediated homologous recombination with wild-type viral DNA to generate a viable virus that express the cloned polynucleotide.

[0911] Many other baculovirus vectors can be used in place of the vector above, such as pAc373, pVL941, and pAcIM1, as one skilled in the art would readily appreciate, as long as the construct provides appropriately located signals for transcription, translation, secretion and the like, including a signal peptide and an in-frame AUG as required. Such vectors are described, for instance, in Luckow et al., Virology 170:31-39 (1989).

[0912] Specifically, the cDNA sequence contained in the deposited clone, including the AUG initiation codon, is amplified using the PCR protocol described in Example 1. If a naturally occurring signal sequence is used to produce the polypeptide of the present invention, the pA2 vector does not need a second signal peptide. Alternatively, the vector can be modified (pA2 GP) to include a baculovirus leader sequence, using the standard methods described in Summers et al., “A Manual of Methods for Baculovirus Vectors and Insect Cell Culture Procedures,” Texas Agricultural Experimental Station Bulletin No. 1555 (1987).

[0913] The amplified fragment is isolated from a 1% agarose gel using a commercially available kit (“Geneclean,” BIO 101 Inc., La Jolla, Calif.). The fragment then is digested with appropriate restriction enzymes and again purified on a 1% agarose gel.

[0914] The plasmid is digested with the corresponding restriction enzymes and optionally, can be dephosphorylated using calf intestinal phosphatase, using routine procedures known in the art. The DNA is then isolated from a 1% agarose gel using a commercially available kit (“Geneclean” BIO 101 Inc., La Jolla, Calif.).

[0915] The fragment and the dephosphorylated plasmid are ligated together with T4 DNA ligase. E. coli HB101 or other suitable E. coli hosts such as XL-1 Blue (Stratagene Cloning Systems, La Jolla, Calif.) cells are transformed with the ligation mixture and spread on culture plates. Bacteria containing the plasmid are identified by digesting DNA from individual colonies and analyzing the digestion product by gel electrophoresis. The sequence of the cloned fragment is confirmed by DNA sequencing.

[0916] Five μg of a plasmid containing the polynucleotide is co-transfected with 1.0 μg of a commercially available linearized baculovirus DNA (“BaculoGold™ baculovirus DNA, Pharmingen, San Diego, Calif.), using the lipofection method described by Felgner et al., Proc. Natl. Acad. Sci. USA 84:7413-7417 (1987). One μg of BaculoGold™ virus DNA and 5 μg of the plasmid are mixed in a sterile well of a microtiter plate containing 50 μl of serum-free Grace's medium (Life Technologies Inc., Gaithersburg, Md.). Afterwards, 10 μl Lipofectin plus 90 μl Grace's medium are added, mixed and incubated for 15 minutes at room temperature. Then the transfection mixture is added drop-wise to Sf9 insect cells (ATCC CRL 1711) seeded in a 35 mm tissue culture plate with 1 ml Grace's medium without serum. The plate is then incubated for 5 hours at 27° C. The transfection solution is then removed from the plate and 1 ml of Grace's insect medium supplemented with 10% fetal calf serum is added. Cultivation is then continued at 27° C. for four days.

[0917] After four days the supernatant is collected and a plaque assay is performed, as described by Summers and Smith, supra. An agarose gel with “Blue Gal” (Life Technologies Inc., Gaithersburg) is used to allow easy identification and isolation of gal-expressing clones, which produce blue-stained plaques. (A detailed description of a “plaque assay” of this type can also be found in the user's guide for insect cell culture and baculovirology distributed by Life Technologies Inc., Gaithersburg, page 9-10.) After appropriate incubation, blue stained plaques are picked with the tip of a micropipettor (e.g., Eppendorf). The agar containing the recombinant viruses is then resuspended in a microcentrifuge tube containing 200 μl of Grace's medium and the suspension containing the recombinant baculovirus is used to infect Sf9 cells seeded in 35 mm dishes. Four days later the supernatants of these culture dishes are harvested and then they are stored at 4° C.

[0918] To verify the expression of the polypeptide, Sf9 cells are grown in Grace's medium supplemented with 10% heat-inactivated FBS. The cells are infected with the recombinant baculovirus containing the polynucleotide at a multiplicity of infection (“MOI”) of about 2. If radiolabeled proteins are desired, 6 hours later the medium is removed and is replaced with SF900 II medium minus methionine and cysteine (available from Life Technologies Inc., Rockville, Md.). After 42 hours, 5 μCi of ³⁵S-methionine and 5 μCi ³⁵S-cysteine (available from Amersham) are added. The cells are further incubated for 16 hours and then are harvested by centrifugation. The proteins in the supernatant as well as the intracellular proteins are analyzed by SDS-PAGE followed by autoradiography (if radiolabeled).

[0919] Microsequencing of the amino acid sequence of the amino terminus of purified protein may be used to determine the amino terminal sequence of the produced protein.

### Example 8

### Expression of a Polypeptide in Mammalian Cells

[0920] The polypeptide of the present invention can be expressed in a mammalian cell. A typical mammalian expression vector contains a promoter element, which mediates the initiation of transcription of mRNA, a protein coding sequence, and signals required for the termination of transcription and polyadenylation of the transcript. Additional elements include enhancers, Kozak sequences and intervening sequences flanked by donor and acceptor sites for RNA splicing. Highly efficient transcription is achieved with the early and late promoters from SV40, the long terminal repeats (LTRs) from Retroviruses, e.g., RSV, HTLVI, HIVI and the early promoter of the cytomegalovirus (CMV). However, cellular elements can also be used (e.g., the human actin promoter).

[0921] Suitable expression vectors for use in practicing the present invention include, for example, vectors such as pSVL and pMSG (Pharmacia, Uppsala, Sweden), pRSVcat (ATCC 37152), pSV2dhfr (ATCC 37146), pBC12MI (ATCC 67109), pCMVSport 2.0, and pCMVSport 3.0. Mammalian host cells that could be used include, human Hela, 293,H9 and Jurkat cells, mouse NIH3T3 and C127 cells, Cos 1, Cos 7 and CV1, quail QC1-3 cells, mouse L cells and Chinese hamster ovary (CHO) cells.

[0922] Alternatively, the polypeptide can be expressed in stable cell lines containing the polynucleotide integrated into a chromosome. The co-transfection with a selectable marker such as DHFR, gpt, neomycin, or hygromycin allows the identification and isolation of the transfected cells.

[0923] The transfected gene can also be amplified to express large amounts of the encoded protein. The DHFR (dihydrofolate reductase) marker is useful in developing cell lines that carry several hundred or even several thousand copies of the gene of interest. (See, e.g., Alt, F. W., et al., J. Biol. Chem. 253:1357-1370 (1978); Hamlin, J. L. and Ma, C., Biochem. et Biophys. Acta, 1097:107-143 (1990); Page, M. J. and Sydenham, M. A., Biotechnology 9:64-68 (1991)). Another useful selection marker is the enzyme glutamine synthase (GS) (Murphy et al., Biochem J. 227:277-279 (1991); Bebbington et al., Bio/Technology 10:169-175 (1992). Using these markers, the mammalian cells are grown in selective medium and the cells with the highest resistance are selected. These cell lines contain the amplified gene(s) integrated into a chromosome. Chinese hamster ovary (CHO) and NSO cells are often used for the production of proteins.

[0924] Derivatives of the plasmid pSV2-dhfr (ATCC Accession No. 37146), the expression vectors pC4 (ATCC Accession No. 209646) and pC6 (ATCC Accession No.209647) contain the strong promoter (LTR) of the Rous Sarcoma Virus (Cullen et al., Molecular and Cellular Biology, 438-447 (March, 1985)) plus a fragment of the CMV-enhancer (Boshart et al., Cell 41:521-530 (1985)). Multiple cloning sites, e.g., with the restriction enzyme cleavage sites BamHI, XbaI and Asp718, facilitate the cloning of the gene of interest. The vectors also contain the 3′ intron, the polyadenylation and termination signal of the rat preproinsulin gene, and the mouse DHFR gene under control of the SV40 early promoter.

[0925] Specifically, the plasmid pC6, for example, is digested with appropriate restriction enzymes and then dephosphorylated using calf intestinal phosphates by procedures known in the art. The vector is then isolated from a 1% agarose gel.

[0926] A polynucleotide of the present invention is amplified according to the protocol outlined in Example 1. If a naturally occurring signal sequence is used to produce the polypeptide of the present invention, the vector does not need a second signal peptide. Alternatively, if a naturally occurring signal sequence is not used, the vector can be modified to include a heterologous signal sequence. (See, e.g., International Publication No. WO 96/34891.)

[0927] The amplified fragment is isolated from a 1% agarose gel using a commercially available kit (“Geneclean,” BIO 101 Inc., La Jolla, Calif.). The fragment then is digested with appropriate restriction enzymes and again purified on a 1% agarose gel.

[0928] The amplified fragment is then digested with the same restriction enzyme and purified on a 1% agarose gel. The isolated fragment and the dephosphorylated vector are then ligated with T4 DNA ligase. E. coli HB101 or XL-1 Blue cells are then transformed and bacteria are identified that contain the fragment inserted into plasmid pC6 using, for instance, restriction enzyme analysis.

[0929] Chinese hamster ovary cells lacking an active DHFR gene is used for transfection. Five μg of the expression plasmid pC6 or pC4 is cotransfected with 0.5 μg of the plasmid pSVneo using lipofectin (Felgner et al., supra). The plasmid pSV2-neo contains a dominant selectable marker, the neo gene from Tn5 encoding an enzyme that confers resistance to a group of antibiotics including G418. The cells are seeded in alpha minus MEM supplemented with 1 mg/ml G418. After 2 days, the cells are trypsinized and seeded in hybridoma cloning plates (Greiner, Germany) in alpha minus MEM supplemented with 10, 25, or 50 ng/ml of methotrexate plus 1 mg/ml G418. After about 10-14 days single clones are trypsinized and then seeded in 6-well petri dishes or 10 ml flasks using different concentrations of methotrexate (50 nM, 100 nM, 200 nM, 400 nM, 800 nM). Clones growing at the highest concentrations of methotrexate are then transferred to new 6-well plates containing even higher concentrations of methotrexate (1 μM, 2 μM, 5 μM, 10 mM, 20 mM). The same procedure is repeated until clones are obtained which grow at a concentration of 100-200 μM. Expression of the desired gene product is analyzed, for instance, by SDS-PAGE and Western blot or by reversed phase HPLC analysis.

### Example 9

### Protein Fusions

[0930] The polypeptides of the present invention are preferably fused to other proteins. These fusion proteins can be used for a variety of applications. For example, fusion of the present polypeptides to His-tag, HA-tag, protein A, IgG domains, and maltose binding protein facilitates purification. (See Example 5; see also EP A 394,827; Traunecker, et al., Nature 331:84-86 (1988)). Similarly, fusion to IgG-1, IgG-3, and albumin increases the halflife time in vivo. Nuclear localization signals fused to the polypeptides of the present invention can target the protein to a specific subcellular localization, while covalent heterodimer or homodimers can increase or decrease the activity of a fusion protein. Fusion proteins can also create chimeric molecules having more than one function. Finally, fusion proteins can increase solubility and/or stability of the fused protein compared to the non-fused protein. All of the types of fusion proteins described above can be made by modifying the following protocol, which outlines the fusion of a polypeptide to an IgG molecule, or the protocol described in Example 5.

[0931] Briefly, the human Fc portion of the IgG molecule can be PCR amplified, using primers that span the 5′ and 3′ ends of the sequence described below. These primers also should have convenient restriction enzyme sites that will facilitate cloning into an expression vector, preferably a mammalian expression vector.

[0932] For example, if pC4 (ATCC Accession No. 209646) is used, the human Fc portion can be ligated into the BamHI cloning site. Note that the 3′ BamHI site should be destroyed. Next, the vector containing the human Fc portion is re-restricted with BamHI, linearizing the vector, and a polynucleotide of the present invention, isolated by the PCR protocol described in Example 1, is ligated into this BamHI site. Note that the polynucleotide is cloned without a stop codon, otherwise a fusion protein will not be produced.

[0933] If the naturally occurring signal sequence is used to produce the polypeptide of the present invention, pC4 does not need a second signal peptide. Alternatively, if the naturally occurring signal sequence is not used, the vector can be modified to include a heterologous signal sequence. (See, e.g., International Publication No. WO 96/34891.)

!Human IgG Fc region:

| | |
|---|---|
| GGGATCCGGAGCCCAAATCTTCTGACAAAACTCACACATGCCCACCGTGCCCA | (SEQ ID NO:1) |

GCACCTGAATTCGAGGGTGCACCGTCAGTCTTCCTCTTCCCCCCAAAACCCAAG
GACACCCTCATGATCTCCCGGACTCCTGAGGTCACATGCGTGGTGGTGGACGTA
AGCCACGAAGACCCTGAGGTCAAGTTCAACTGGTACGTGGACGGCGTGGAGGT
GCATAATGCCAAGACAAAGCCGCGGGAGGAGCAGTACAACAGCACGTACCGTG
TGGTCAGCGTCCTCACCGTCCTGCACCAGGACTGGCTGAATGGCAAGGAGTAC
AAGTGCAAGGTCTCCAACAAAGCCCTCCCAACCCCCATCGAGAAAACCATCTC
CAAAGCCAAAGGGCAGCCCCGAGAACCACAGGTGTACACCCTGCCCCCATCCC
GGGATGAGCTGACCAAGAACCAGGTCAGCCTGACCTGCCTGGTCAAAGGCTTC
TATCCAAGCGACATCGCCGTGGAGTGGGAGAGCAATGGGCAGCCGGAGAACAA
CTACAAGACCACGCCTCCCGTGCTGGACTCCGACGGCTCCTTCTTCCTCTACAG
CAAGCTCACCGTGGACAAGAGCAGGTGGCAGCAGGGGAACGTCTTCTCATGCT
CCGTGATGCATGAGGCTCTGCACAACCACTACACGCAGAAGAGCCTCTCCCTGT
CTCCGGGTAAATGAGTGCGACGGCCGCGACTCTAGAGGAT

### Example 10

### Production of an Antibody from a Polypeptide

[0934] a) Hybridoma Technology

[0935] The antibodies of the present invention can be prepared by a variety of methods. (See, Current Protocols, Chapter 2.) As one example of such methods, cells expressing a polypeptide of the present invention are administered to an animal to induce the production of sera containing polyclonal antibodies. In a preferred method, a preparation of a a polypeptide of the present invention is prepared and purified to render it substantially free of natural contaminants. Such a preparation is then introduced into an animal in order to produce polyclonal antisera of greater specific activity.

[0936] Monoclonal antibodies specific for a polypeptide of the present invention are prepared using hybridoma technology (Kohler et al., Nature 256:495 (1975); Kohler et al., Eur. J. Immunol. 6:511 (1976); Kohler et al., Eur. J. Immunol. 6:292 (1976); Hammerling et al., in: Monoclonal Antibodies and T-Cell Hybridomas, Elsevier, N.Y., pp. 563-681 (1981)). In general, an animal (preferably a mouse) is immunized with a polypeptide of the present invention or, more preferably, with a secreted polypeptide of the present invention-expressing cell. Such polypeptide-expressing cells are cultured in any suitable tissue culture medium, preferably in Earle's modified Eagle's medium supplemented with 10% fetal bovine serum (inactivated at about 56° C.), and supplemented with about 10 g/l of nonessential amino acids, about 1,000 U/ml of penicillin, and about 100 μg/ml of streptomycin.

[0937] The splenocytes of such mice are extracted and fused with a suitable myeloma cell line. Any suitable myeloma cell line may be employed in accordance with the present invention; however, it is preferable to employ the parent myeloma cell line (SP2O), available from the ATCC. After fusion, the resulting hybridoma cells are selectively maintained in HAT medium, and then cloned by limiting dilution as described by Wands et al. (Gastroenterology 80:225-232 (1981)). The hybridoma cells obtained through such a selection are then assayed to identify clones which secrete antibodies capable of binding the polypeptide of the present invention.

[0938] Alternatively, additional antibodies capable of binding to polypeptide of the present invention can be produced in a two-step procedure using anti-idiotypic antibodies. Such a method makes use of the fact that antibodies are themselves antigens, and therefore, it is possible to obtain an antibody which binds to a second antibody. In accordance with this method, protein specific antibodies are used to immunize an animal, preferably a mouse. The splenocytes of such an animal are then used to produce hybridoma cells, and the hybridoma cells are screened to identify clones which produce an antibody whose ability to bind to the polypeptide of the present invention-specific antibody can be blocked by polypeptide of the present invention. Such antibodies comprise anti-idiotypic antibodies to the polypeptide of the present invention-specific antibody and are used to immunize an animal to induce formation of further polypeptide of the present invention-specific antibodies.

[0939] For in vivo use of antibodies in humans, an antibody is “humanized”. Such antibodies can be produced using genetic constructs derived from hybridoma cells producing the monoclonal antibodies described above. Methods for producing chimeric and humanized antibodies are known in the art and are discussed herein. (See, for review, Morrison, Science 229:1202 (1985); Oi et al., BioTechniques 4:214 (1986); Cabilly et al., U.S. Pat. No. 4,816,567; Taniguchi et al., EP 171496; Morrison et al., EP 173494; Neuberger et al., WO 8601533; Robinson et al., International Publication No. WO 8702671; Boulianne et al., Nature 312:643 (1984); Neuberger et al., Nature 314:268 (1985)).

[0940] b) Isolation of Antibody Fragments Directed Against Polypeptide of the Present Invention from a Library of scFvs

[0941] Naturally occurring V-genes isolated from human PBLs are constructed into a library of antibody fragments which contain reactivities against polypeptide of the present invention to which the donor may or may not have been exposed (see e.g., U.S. Pat. No. 5,885,793 incorporated herein by reference in its entirety).

[0942] Rescue of the Library.

[0943] A library of scFvs is constructed from the RNA of human PBLs as described in International Publication No. WO 92/01047. To rescue phage displaying antibody fragments, approximately 10⁹ E. coli harboring the phagemid are used to inoculate 50 ml of 2xTY containing 1% glucose and 100 μg/ml of ampicillin (2xTY-AMP-GLU) and grown to an O.D. of 0.8 with shaking. Five ml of this culture is used to inoculate 50 ml of 2xTY-AMP-GLU, 2×108 TU of delta gene 3 helper (M13 delta gene III, see International Publication No. WO 92/01047) are added and the culture incubated at 37° C. for 45 minutes without shaking and then at 37° C. for 45 minutes with shaking. The culture is centrifuged at 4000 r.p.m. for 10 min. and the pellet resuspended in 2 liters of 2xTY containing 100 μg/ml ampicillin and 50 ug/ml kanamycin and grown overnight. Phage are prepared as described in International Publication No. WO 92/01047.

[0944] M13 delta gene III is prepared as follows: M13 delta gene III helper phage does not encode gene III protein, hence the phage(mid) displaying antibody fragments have a greater avidity of binding to antigen. Infectious M13 delta gene III particles are made by growing the helper phage in cells harboring a pUC19 derivative supplying the wild type gene III protein during phage morphogenesis. The culture is incubated for 1 hour at 37° C. without shaking and then for a further hour at 37° C. with shaking. Cells are spun down (IEC-Centra 8,400 r.p.m. for 10 min), resuspended in 300 ml 2xTY broth containing 100 μg ampicillin/ml and 25 μg kanamycin/ml (2xTY-AMP-KAN) and grown overnight, shaking at 37° C. Phage particles are purified and concentrated from the culture medium by two PEG-precipitations (Sambrook et al., 1990), resuspended in 2 ml PBS and passed through a 0.45 μm filter (Minisart NML; Sartorius) to give a final concentration of approximately 10¹³ transducing units/ml (ampicillin-resistant clones).

[0945] Panning of the Library.

[0946] Immunotubes (Nunc) are coated overnight in PBS with 4 ml of either 100 μg/ml or 10 μg/ml of a polypeptide of the present invention. Tubes are blocked with 2% Marvel-PBS for 2 hours at 37° C. and then washed 3 times in PBS. Approximately 10¹³ TU of phage is applied to the tube and incubated for 30 minutes at room temperature tumbling on an over and under turntable and then left to stand for another 1.5 hours. Tubes are washed 10 times with PBS 0.1% Tween-20 and 10 times with PBS. Phage are eluted by adding 1 ml of 100 mM triethylamine and rotating 15 minutes on an under and over turntable after which the solution is immediately neutralized with 0.5 ml of 1.0M Tris-HCl, pH 7.4. Phage are then used to infect 10 ml of mid-log E. coli TG1 by incubating eluted phage with bacteria for 30 minutes at 37° C. The E. coli are then plated on TYE plates containing 1% glucose and 100 μg/ml ampicillin. The resulting bacterial library is then rescued with delta gene 3 helper phage as described above to prepare phage for a subsequent round of selection. This process is then repeated for a total of 4 rounds of affinity purification with tube-washing increased to 20 times with PBS, 0.1% Tween-20 and 20 times with PBS for rounds 3 and 4.

[0947] Characterization of Binders.

[0948] Eluted phage from the 3rd and 4th rounds of selection are used to infect E. coli HB 2151 and soluble scFv is produced (Marks, et al., 1991) from single colonies for assay. ELISAs are performed with microtitre plates coated with either 10 pg/ml of the polypeptide of the present invention in 50 mM bicarbonate pH 9.6. Clones positive in ELISA are further characterized by PCR fingerprinting (see, e.g., International Publication No. WO 92/01047) and then by sequencing. These ELISA positive clones may also be further characterized by techniques known in the art, such as, for example, epitope mapping, binding affinity, receptor signal transduction, ability to block or competitively inhibit antibody/antigen binding, and competitive agonistic or antagonistic activity.

### Example 11

### Method of Determining Alterations in a Gene Corresponding to a Polynucleotide

[0949] RNA isolated from entire families or individual patients presenting with a phenotype of interest (such as a disease) is isolated. cDNA is then generated from these RNA samples using protocols known in the art. (See, Sambrook.) The cDNA is then used as a template for PCR, employing primers surrounding regions of interest in SEQ ID NO:X; and/or the nucleotide sequence of the cDNA contained in Clone ID NO:Z. Suggested PCR conditions consist of 35 cycles at 95 degrees C for 30 seconds; 60-120 seconds at 52-58 degrees C; and 60-120 seconds at 70 degrees C, using buffer solutions described in Sidransky et al., Science 252:706 (1991).

[0950] PCR products are then sequenced using primers labeled at their 5′ end with T4 polynucleotide kinase, employing SequiTherm Polymerase (Epicentre Technologies). The intron-exon boundaries of selected exons is also determined and genomic PCR products analyzed to confirm the results. PCR products harboring suspected mutations are then cloned and sequenced to validate the results of the direct sequencing.

[0951] PCR products are cloned into T-tailed vectors as described in Holton et al., Nucleic Acids Research, 19:1156 (1991) and sequenced with T7 polymerase (United States Biochemical). Affected individuals are identified by mutations not present in unaffected individuals.

[0952] Genomic rearrangements are also observed as a method of determining alterations in a gene corresponding to a polynucleotide. Genomic clones isolated according to Example 2 are nick-translated with digoxigenindeoxy-uridine 5′-triphosphate (Boehringer Manheim), and FISH performed as described in Johnson et al., Methods Cell Biol. 35:73-99 (1991). Hybridization with the labeled probe is carried out using a vast excess of human cot-1 DNA for specific hybridization to the corresponding genomic locus.

[0953] Chromosomes are counterstained with 4,6-diamino-2-phenylidole and propidium iodide, producing a combination of C- and R-bands. Aligned images for precise mapping are obtained using a triple-band filter set (Chroma Technology, Brattleboro, Vt.) in combination with a cooled charge-coupled device camera (Photometrics, Tucson, Ariz.) and variable excitation wavelength filters. (Johnson et al., Genet. Anal. Tech. Appl., 8:75 (1991)). Image collection, analysis and chromosomal fractional length measurements are performed using the ISee Graphical Program System. (Inovision Corporation, Durham, N.C.) Chromosome alterations of the genomic region hybridized by the probe are identified as insertions, deletions, and translocations. These alterations are used as a diagnostic marker for an associated disease.

### Example 12

### Method of Detecting Abnormal Levels of a Polypeptide in a Biological Sample

[0954] A polypeptide of the present invention can be detected in a biological sample, and if an increased or decreased level of the polypeptide is detected, this polypeptide is a marker for a particular phenotype. Methods of detection are numerous, and thus, it is understood that one skilled in the art can modify the following assay to fit their particular needs.

[0955] For example, antibody-sandwich ELISAs are used to detect polypeptides in a sample, preferably a biological sample. Wells of a microtiter plate are coated with specific antibodies, at a final concentration of 0.2 to 10 ug/ml. The antibodies are either monoclonal or polyclonal and are produced by the method described in Example 10. The wells are blocked so that non-specific binding of the polypeptide to the well is reduced.

[0956] The coated wells are then incubated for >2 hours at RT with a sample containing the polypeptide. Preferably, serial dilutions of the sample should be used to validate results. The plates are then washed three times with deionized or distilled water to remove unbound polypeptide.

[0957] Next, 50 ul of specific antibody-alkaline phosphatase conjugate, at a concentration of 25-400 ng, is added and incubated for 2 hours at room temperature. The plates are again washed three times with deionized or distilled water to remove unbound conjugate.

[0958] Add 75 ul of 4-methylumbelliferyl phosphate (MUP) or p-nitrophenyl phosphate (NPP) substrate solution to each well and incubate 1 hour at room temperature. Measure the reaction by a microtiter plate reader. Prepare a standard curve, using serial dilutions of a control sample, and plot polypeptide concentration on the X-axis (log scale) and fluorescence or absorbance of the Y-axis (linear scale). Interpolate the concentration of the polypeptide in the sample using the standard curve.

### Example 13

### Formulation

[0959] The invention also provides methods of treatment and/or prevention of diseases or disorders (such as, for example, any one or more of the diseases or disorders disclosed herein) by administration to a subject of an effective amount of a Therapeutic. By therapeutic is meant polynucleotides or polypeptides of the invention (including fragments and variants), agonists or antagonists thereof, and/or antibodies thereto, in combination with a pharmaceutically acceptable carrier type (e.g., a sterile carrier).

[0960] The Therapeutic will be formulated and dosed in a fashion consistent with good medical practice, taking into account the clinical condition of the individual patient (especially the side effects of treatment with the Therapeutic alone), the site of delivery, the method of administration, the scheduling of administration, and other factors known to practitioners. The “effective amount” for purposes herein is thus determined by such considerations.

[0961] As a general proposition, the total pharmaceutically effective amount of the Therapeutic administered parenterally per dose will be in the range of about lug/kg/day to 10 mg/kg/day of patient body weight, although, as noted above, this will be subject to therapeutic discretion. More preferably, this dose is at least 0.01 mg/kg/day, and most preferably for humans between about 0.01 and 1 mg/kg/day for the hormone. If given continuously, the Therapeutic is typically administered at a dose rate of about 1 ug/kg/hour to about 50 ug/kg/hour, either by 1-4 injections per day or by continuous subcutaneous infusions, for example, using a mini-pump. An intravenous bag solution may also be employed. The length of treatment needed to observe changes and the interval following treatment for responses to occur appears to vary depending on the desired effect.

[0962] Therapeutics can be are administered orally, rectally, parenterally, intracistemally, intravaginally, intraperitoneally, topically (as by powders, ointments, gels, drops or transdermal patch), bucally, or as an oral or nasal spray. “Pharmaceutically acceptable carrier” refers to a non-toxic solid, semisolid or liquid filler, diluent, encapsulating material or formulation auxiliary of any. The term “parenteral” as used herein refers to modes of administration which include intravenous, intramuscular, intraperitoneal, intrastemal, subcutaneous and intraarticular injection and infusion.

[0963] Therapeutics of the invention are also suitably administered by sustained-release systems. Suitable examples of sustained-release Therapeutics are administered orally, rectally, parenterally, intracistemally, intravaginally, intraperitoneally, topically (as by powders, ointments, gels, drops or transdermal patch), bucally, or as an oral or nasal spray. “Pharmaceutically acceptable carrier” refers to a non-toxic solid, semisolid or liquid filler, diluent, encapsulating material or formulation auxiliary of any type. The term “parenteral” as used herein refers to modes of administration which include intravenous, intramuscular, intraperitoneal, intrastemal, subcutaneous and intraarticular injection and infusion.

[0964] Therapeutics of the invention are also suitably administered by sustained-release systems. Suitable examples of sustained-release Therapeutics include suitable polymeric materials (such as, for example, semi-permeable polymer matrices in the form of shaped articles, e.g., films, or mirocapsules), suitable hydrophobic materials (for example as an emulsion in an acceptable oil) or ion exchange resins, and sparingly soluble derivatives (such as, for example, a sparingly soluble salt).

[0965] Sustained-release matrices include polylactides (U.S. Pat. No. 3,773,919, EP 58,481), copolymers of L-glutamic acid and gamma-ethyl-L-glutamate (Sidman et al., Biopolymers 22:547-556 (1983)), poly (2- hydroxyethyl methacrylate) (Langer et al., J. Biomed. Mater. Res. 15:167-277 (1981), and Langer, Chem. Tech. 12:98-105 (1982)), ethylene vinyl acetate (Langer et al., Id.) or poly-D-(−)-3-hydroxybutyric acid (EP 133,988).

[0966] Sustained-release Therapeutics also include liposomally entrapped Therapeutics of the invention (see generally, Langer, Science 249:1527-1533 (1990); Treat et al., in Liposomes in the Therapy of Infectious Disease and Cancer, Lopez-Berestein and Fidler (eds.), Liss, New York, pp. 317-327 and 353-365 (1989)). Liposomes containing the Therapeutic are prepared by methods known per se: DE 3,218,121; Epstein et al., Proc. Natl. Acad. Sci. (USA) 82:3688-3692 (1985); Hwang et al., Proc. Natl. Acad. Sci.(USA) 77:4030-4034 (1980); EP 52,322; EP 36,676; EP 88,046; EP 143,949; EP 142,641; Japanese Pat. Appl. 83-118008; U.S. Pat. Nos. 4,485,045 and 4,544,545; and EP 102,324. Ordinarily, the liposomes are of the small (about 200-800 Angstroms) unilamellar type in which the lipid content is greater than about 30 mol. percent cholesterol, the selected proportion being adjusted for the optimal Therapeutic.

[0967] In yet an additional embodiment, the Therapeutics of the invention are delivered by way of a pump (see Langer, supra; Sefton, CRC Crit. Ref. Biomed. Eng. 14:201 (1987); Buchwald et al., Surgery 88:507 (1980); Saudek et al., N. Engl. J. Med. 321:574 (1989)).

[0968] Other controlled release systems are discussed in the review by Langer (Science 249:1527-1533 (1990)).

[0969] For parenteral administration, in one embodiment, the Therapeutic is formulated generally by mixing it at the desired degree of purity, in a unit dosage injectable form (solution, suspension, or emulsion), with a pharmaceutically acceptable carrier, i.e., one that is non-toxic to recipients at the dosages and concentrations employed and is compatible with other ingredients of the formulation. For example, the formulation preferably does not include oxidizing agents and other compounds that are known to be deleterious to the Therapeutic.

[0970] Generally, the formulations are prepared by contacting the Therapeutic uniformly and intimately with liquid carriers or finely divided solid carriers or both. Then, if necessary, the product is shaped into the desired formulation. Preferably the carrier is a parenteral carrier, more preferably a solution that is isotonic with the blood of the recipient. Examples of such carrier vehicles include water, saline, Ringer's solution, and dextrose solution. Non-aqueous vehicles such as fixed oils and ethyl oleate are also useful herein, as well as liposomes.

[0971] The carrier suitably contains minor amounts of additives such as substances that enhance isotonicity and chemical stability. Such materials are non-toxic to recipients at the dosages and concentrations employed, and include buffers such as phosphate, citrate, succinate, acetic acid, and other organic acids or their salts; antioxidants such as ascorbic acid; low molecular weight (less than about ten residues) polypeptides, e.g., polyarginine or tripeptides; proteins, such as serum albumin, gelatin, or immunoglobulins; hydrophilic polymers such as polyvinylpyrrolidone; amino acids, such as glycine, glutamic acid, aspartic acid, or arginine; monosaccharides, disaccharides, and other carbohydrates including cellulose or its derivatives, glucose, manose, or dextrins; chelating agents such as EDTA; sugar alcohols such as mannitol or sorbitol; counterions such as sodium; and/or nonionic surfactants such as polysorbates, poloxamers, or PEG.

[0972] The Therapeutic is typically formulated in such vehicles at a concentration of about 0.1 mg/ml to 100 mg/ml, preferably 1-10 mg/ml, at a pH of about 3 to 8. It will be understood that the use of certain of the foregoing excipients, carriers, or stabilizers will result in the formation of polypeptide salts.

[0973] Any pharmaceutical used for therapeutic administration can be sterile. Sterility is readily accomplished by filtration through sterile filtration membranes (e.g., 0.2 micron membranes). Therapeutics generally are placed into a container having a sterile access port, for example, an intravenous solution bag or vial having a stopper pierceable by a hypodermic injection needle.

[0974] Therapeutics ordinarily will be stored in unit or multi-dose containers, for example, sealed ampoules or vials, as an aqueous solution or as a lyophilized formulation for reconstitution. As an example of a lyophilized formulation, 10-ml vials are filled with 5 ml of sterile-filtered 1% (w/v) aqueous Therapeutic solution, and the resulting mixture is lyophilized. The infusion solution is prepared by reconstituting the lyophilized Therapeutic using bacteriostatic Water-for-Injection.

[0975] The invention also provides a pharmaceutical pack or kit comprising one or more containers filled with one or more of the ingredients of the Therapeutics of the invention. Associated with such container(s) can be a notice in the form prescribed by a governmental agency regulating the manufacture, use or sale of pharmaceuticals or biological products, which notice reflects approval by the agency of manufacture, use or sale for human administration. In addition, the Therapeutics may be employed in conjunction with other therapeutic compounds.

[0976] The Therapeutics of the invention may be administered alone or in combination with adjuvants. Adjuvants that may be administered with the Therapeutics of the invention include, but are not limited to, alum, alum plus deoxycholate (ImmunoAg), MTP-PE (Biocine Corp.), QS21 (Genentech, Inc.), BCG (e.g., THERACYS®), MPL and nonviable prepartions of Corynebacterium parvum. In a specific embodiment, Therapeutics of the invention are administered in combination with alum. In another specific embodiment, Therapeutics of the invention are administered in combination with QS-21. Further adjuvants that may be administered with the Therapeutics of the invention include, but are not limited to, Monophosphoryl lipid immunomodulator, AdjuVax 100a, QS-21, QS-18, CRL1005, Aluminum salts, MF-59, and Virosomal adjuvant technology. Vaccines that may be administered with the Therapeutics of the invention include, but are not limited to, vaccines directed toward protection against MMR (measles, mumps, rubella), polio, varicella, tetanus/diptheria, hepatitis A, hepatitis B, haemophilus influenzae B, whooping cough, pneumonia, influenza, Lyme's Disease, rotavirus, cholera, yellow fever, Japanese encephalitis, poliomyelitis, rabies, typhoid fever, and pertussis. Combinations may be administered either concomitantly, e.g., as an admixture, separately but simultaneously or concurrently; or sequentially. This includes presentations in which the combined agents are administered together as a therapeutic mixture, and also procedures in which the combined agents are administered separately but simultaneously, e.g., as through separate intravenous lines into the same individual. Administration “in combination” further includes the separate administration of one of the compounds or agents given first, followed by the second.

[0977] The Therapeutics of the invention may be administered alone or in combination with other therapeutic agents. Therapeutic agents that may be administered in combination with the Therapeutics of the invention, include but are not limited to, anticoagulant, thrombolytic, and/or anti-platelet drugs; hematopoietic growth factors; antibiotics; anti-viral and/or anti-retroviral agents; chemotherapeutic agents, steroidal and non-steroidal anti-inflammatories, immunotherapeutic agents, cytokines and/or growth factors. Combinations may be administered either concomitantly, e.g., as an admixture, separately but simultaneously or concurrently; or sequentially. This includes presentations in which the combined agents are administered together as a therapeutic mixture, and also procedures in which the combined agents are administered separately but simultaneously, e.g., as through separate intravenous lines into the same individual. Administration “in combination” further includes the separate administration of one of the compounds or agents given first, followed by the second.

[0978] In one embodiment, the Therapeutics of the invention are administered in combination with an anticoagulant. Anticoagulants that may be administered with the compositions of the invention include, but are not limited to, heparin, low molecular weight heparin, warfarin sodium (e.g., COUMADIN®), dicumarol, 4-hydroxycoumarin, anisindione (e.g., MIRADON™), acenocoumarol (e.g., nicoumalone, SINTHROME™), indan-1,3-dione, phenprocoumon (e.g., MARCUMAR™), ethyl biscoumacetate (e.g., TROMEXAN™), and aspirin. In a specific embodiment, compositions of the invention are administered in combination with heparin and/or warfarin. In another specific embodiment, compositions of the invention are administered in combination with warfarin. In another specific embodiment, compositions of the invention are administered in combination with warfarin and aspirin. In another specific embodiment, compositions of the invention are administered in combination with heparin. In another specific embodiment, compositions of the invention are administered in combination with heparin and aspirin.

[0979] In another embodiment, the Therapeutics of the invention are administered in combination with thrombolytic drugs. Thrombolytic drugs that may be administered with the compositions of the invention include, but are not limited to, plasminogen, lys-plasminogen, alpha2-antiplasmin, streptokinae (e.g., KABIKINASE™), antiresplace (e.g., EMINASE™), tissue plasminogen activator (t-PA, altevase, ACTIVASE™), urokinase (e.g., ABBOKINASE™), sauruplase, (Prourokinase, single chain urokinase), and aminocaproic acid (e.g., AMICAR™). In a specific embodiment, compositions of the invention are administered in combination with tissue plasminogen activator and aspirin.

[0980] In another embodiment, the Therapeutics of the invention are administered in combination with antiplatelet drugs. Antiplatelet drugs that may be administered with the compositions of the invention include, but are not limited to, aspirin, dipyridamole (e.g., PERSANTINE™), and ticlopidine (e.g., TICLID™).

[0981] In specific embodiments, the use of anti-coagulants, thrombolytic and/or antiplatelet drugs in combination with Therapeutics of the invention is contemplated for the prevention, diagnosis, and/or treatment of thrombosis, arterial thrombosis, venous thrombosis, thromboembolism, pulmonary embolism, atherosclerosis, myocardial infarction, transient ischemic attack, unstable angina. In specific embodiments, the use of anticoagulants, thrombolytic drugs and/or antiplatelet drugs in combination with Therapeutics of the invention is contemplated for the prevention of occulsion of saphenous grafts, for reducing the risk of periprocedural thrombosis as might accompany angioplasty procedures, for reducing the risk of stroke in patients with atrial fibrillation including nonrheumatic atrial fibrillation, for reducing the risk of embolism associated with mechanical heart valves and or mitral valves disease. Other uses for the therapeutics of the invention, alone or in combination with antiplatelet, anticoagulant, and/or thrombolytic drugs, include, but are not limited to, the prevention of occlusions in extracorporeal devices (e.g., intravascular canulas, vascular access shunts in hemodialysis patients, hemodialysis machines, and cardiopulmonary bypass machines).

[0982] In certain embodiments, Therapeutics of the invention are administered in combination with antiretroviral agents, nucleoside/nucleotide reverse transcriptase inhibitors (NRTIs), non-nucleoside reverse transcriptase inhibitors (NNRTIs), and/or protease inhibitors (PIs). NRTIs that may be administered in combination with the Therapeutics of the invention, include, but are not limited to, RETROVIR™ (zidovudine/AZT), VIDEX™ (didanosine/ddl), HIVID™ (zalcitabine/ddC), ZERIT™ (stavudine/d4T), EPIVIR™ (lamivudine/3TC), and COMBIVIR™ (zidovudine/lamivudine). NNRTIs that may be administered in combination with the Therapeutics of the invention, include, but are not limited to, VIRAMUNE™ (nevirapine), RESCRIPTOR™ (delavirdine), and SUSTIVA™ (efavirenz). Protease inhibitors that may be administered in combination with the Therapeutics of the invention, include, but are not limited to, CRIXIVAN™ (indinavir), NORVIR™ (ritonavir), INVIRASE™ (saquinavir), and VIRACEPT™ (nelfinavir). In a specific embodiment, antiretroviral agents, nucleoside reverse transcriptase inhibitors, non-nucleoside reverse transcriptase inhibitors, and/or protease inhibitors may be used in any combination with Therapeutics of the invention to treat AIDS and/or to prevent or treat HIV infection.

[0983] Additional NRTIs include LODENOSINE™ (F-ddA; an acid-stable adenosine NRTI; Triangle/Abbott; COVIRACIL™ (emtricitabine/FTC; structurally related to lamivudine (3TC) but with 3- to 10-fold greater activity in vitro; Triangle/Abbott); dOTC (BCH-10652, also structurally related to lamivudine but retains activity against a substantial proportion of lamivudine-resistant isolates; Biochem Pharma); Adefovir (refused approval for anti-HIV therapy by FDA; Gilead Sciences); PREVEON® (Adefovir Dipivoxil, the active prodrug of adefovir; its active form is PMEA-pp); TENOFOVIR” (bis-POC PMPA, a PMPA prodrug; Gilead); DAPD/DXG (active metabolite of DAPD; Triangle/Abbott); D-D4FC (related to 3TC, with activity against AZT/3TC-resistant virus); GW420867X (Glaxo Wellcome); ZIAGEN™ (abacavir/159U89; Glaxo Wellcome Inc.); CS-87 (3′azido-2′,3′-dideoxyuridine; WO 99/66936); and S-acyl-2-thioethyl (SATE)-bearing prodrug forms of β-L-FD4C and β-L-FddC (WO 98/17281).

[0984] Additional NNRTIs include COACTINON™ (Emivirine/MKC-442, potent NNRTI of the HEPT class; Triangle/Abbott); CAPRAVIRINE™ (AG-1 549/S-1 153, a next generation NNRTI with activity against viruses containing the K103N mutation; Agouron); PNU-142721 (has 20- to 50-fold greater activity than its predecessor delavirdine and is active against K103N mutants; Pharmacia & Upjohn); DPC-961 and DPC-963 (second-generation derivatives of efavirenz, designed to be active against viruses with the K103N mutation; DuPont); GW-420867X (has 25-fold greater activity than HBY097 and is active against K103N mutants; Glaxo Wellcome); CALANOLIDE A (naturally occurring agent from the latex tree; active against viruses containing either or both the Y181C and K103N mutations); and Propolis (WO 99/49830).

[0985] Additional protease inhibitors include LOPINAVIR™ (ABT378/r; Abbott Laboratories); BMS-232632 (an azapeptide; Bristol-Myres Squibb); TIPRANAVIR™ (PNU-140690, a non-peptic dihydropyrone; Pharmacia & Upjohn); PD-178390 (a nonpeptidic dihydropyrone; Parke-Davis); BMS 232632 (an azapeptide; Bristol-Myers Squibb); L-756,423 (an indinavir analog; Merck); DMP-450 (a cyclic urea compound; Avid & DuPont); AG-1776 (a peptidomimetic with in vitro activity against protease inhibitor-resistant viruses; Agouron); VX-175/GW-433908 (phosphate prodrug of amprenavir; Vertex & Glaxo Welcome); CGP61755 (Ciba); and AGENERASE™ (amprenavir; Glaxo Wellcome Inc.).

[0986] Additional antiretroviral agents include fusion inhibitors/gp41 binders. Fusion inhibitors/gp4l binders include T-20 (a peptide from residues 643-678 of the HIV gp4l transmembrane protein ectodomain which binds to gp41 in its resting state and prevents transformation to the fusogenic state; Trimeris) and T-1249 (a second-generation fusion inhibitor; Trimeris).

[0987] Additional antiretroviral agents include fusion inhibitors/chemokine receptor antagonists. Fusion inhibitors/chemokine receptor antagonists include CXCR4 antagonists such as AMD 3100 (a bicyclam), SDF-1 and its analogs, and ALX40-4C (a cationic peptide), T22 (an 18 amino acid peptide; Trimeris) and the T22 analogs T134 and T140; CCR5 antagonists such as RANTES (9-68), AOP-RANTES, NNY-RANTES, and TAK-779; and CCR5/CXCR4 antagonists such as NSC 651016 (a distamycin analog). Also included are CCR2B, CCR3, and CCR6 antagonists. Chemokine recpetor agonists such as RANTES, SDF-1, MIP-1α, MIP-1β, etc., may also inhibit fusion.

[0988] Additional antiretroviral agents include integrase inhibitors. Integrase inhibitors include dicaffeoylquinic (DFQA) acids; L-chicoric acid (a dicaffeoyltartaric (DCTA) acid); quinalizarin (QLC) and related anthraquinones; ZINTEVIR™ (AR 177, an oligonucleotide that probably acts at cell surface rather than being a true integrase inhibitor; Arondex); and naphthols such as those disclosed in WO 98/50347.

[0989] Additional antiretroviral agents include hydroxyurea-like compunds such as BCX-34 (a purine nucleoside phosphorylase inhibitor; Biocryst); ribonucleotide reductase inhibitors such as DIDOX™ (Molecules for Health); inosine monophosphate dehydrogenase (IMPDH) inhibitors sucha as VX-497 (Vertex); and mycopholic acids such as CellCept (mycophenolate mofetil; Roche).

[0990] Additional antiretroviral agents include inhibitors of viral integrase, inhibitors of viral genome nuclear translocation such as arylene bis(methylketone) compounds; inhibitors of HIV entry such as AOP-RANTES, NNY-RANTES, RANTES-IgG fusion protein, soluble complexes of RANTES and glycosaminoglycans (GAG), and AMD-3100; nucleocapsid zinc finger inhibitors such as dithiane compounds; targets of HIV Tat and Rev; and pharmacoenhancers such as ABT-378.

[0991] Other antiretroviral therapies and adjunct therapies include cytokines and lymphokines such as MIP-1α, MIP-1β, SDF-1α, IL-2, PROLEUKIN™ (aldesleukin/L2-7001; Chiron), IL-4, IL-10, IL-12, and IL-13; interferons such as IFN-α2a; antagonists of TNFs, NFκB, GM-CSF, M-CSF, and IL-10; agents that modulate immune activation such as cyclosporin and prednisone; vaccines such as Remune™ (HIV Immunogen), APL 400-003 (Apollon), recombinant gp120 and fragments, bivalent (B/E) recombinant envelope glycoprotein, rgp120CM235, MN rgp120, SF-2 rgp120, gp120/soluble CD4 complex, Delta JR-FL protein, branched synthetic peptide derived from discontinuous gp120 C3/C4 domain, fusion-competent immunogens, and Gag, Pol, Nef, and Tat vaccines; gene-based therapies such as genetic suppressor elements (GSEs; WO 98/54366), and intrakines (genetically modified CC chemokines targetted to the ER to block surface expression of newly synthesized CCR5 (Yang et al., PNAS 94:11567-72 (1997); Chen et al., Nat. Med. 3:1110-16 (1997)); antibodies such as the anti-CXCR4 antibody 12G5, the anti-CCR5 antibodies 2D7, 5C7, PA8, PA9, PA10, PA11, PA1 2, and PA14, the anti-CD4 antibodies Q4120 and RPA-T4, the anti-CCR3 antibody 7B11, the anti-gp120 antibodies 17b, 48d, 447-52D, 257-D, 268-D and 50.1, anti-Tat antibodies, anti-TNF-α antibodies, and monoclonal antibody 33A; aryl hydrocarbon (AH) receptor agonists and antagonists such as TCDD, 3,3′,4,4′,5-pentachlorobiphenyl, 3,3′,4,4′-tetrachlorobiphenyl, and α-naphthoflavone (WO 98/30213); and antioxidants such as γ-L-glutamyl-L-cysteine ethyl ester (γ-GCE; WO 99/56764).

[0992] In a further embodiment, the Therapeutics of the invention are administered in combination with an antiviral agent. Antiviral agents that may be administered with the Therapeutics of the invention include, but are not limited to, acyclovir, ribavirin, amantadine, and remantidine.

[0993] In other embodiments, Therapeutics of the invention may be administered in combination with anti-opportunistic infection agents. Anti-opportunistic agents that may be administered in combination with the Therapeutics of the invention, include, but are not limited to, TRIMETHOPRIM-SULFAMETHOXAZOLE™, DAPSONE™, PENTAMIDINE™, ATOVAQUONE™, ISONIAZID™, RIFAMPIN™, PYRAZINAMIDE™, ETHAMBUTOL™, RIFABUTIN™, CLARITHROMYCIN™, AZITHROMYCIN™, GANCICLOVIR™, FOSCARNET™, CIDOFOVIR™, FLUCONAZOLE™, ITRACONAZOLE™, KETOCONAZOLE™, ACYCLOVIR™, FAMCICOLVIR™, PYRIMETHAMINE™, LEUCOVORIN™, NEUPOGEN™ (filgrastim/G-CSF), and LEUKINE™ (sargramostim/GM-CSF). In a specific embodiment, Therapeutics of the invention are used in any combination with TRIMETHOPRIM-SULFAMETHOXAZOLE™, DAPSONE™, PENTAMIDINE™, and/or ATOVAQUONE™ to prophylactically treat or prevent an opportunistic Pneumocystis carinii pneumonia infection. In another specific embodiment, Therapeutics of the invention are used in any combination with ISONIAZID™, RIFAMPIN™, PYRAZINAMIDE™, and/or ETHAMBUTOL™ to prophylactically treat or prevent an opportunistic Mycobacterium avium complex infection. In another specific embodiment, Therapeutics of the invention are used in any combination with RIFABUTIN™, CLARITHROMYCIN™, and/or AZITHROMYCIN™ to prophylactically treat or prevent an opportunistic Mycobacterium tuberculosis infection. In another specific embodiment, Therapeutics of the invention are used in any combination with GANCICLOVIR™, FOSCARNET™, and/or CIDOFOVIR™ to prophylactically treat or prevent an opportunistic cytomegalovirus infection. In another specific embodiment, Therapeutics of the invention are used in any combination with FLUCONAZOLE™, ITRACONAZOLE™, and/or KETOCONAZOLE™ to prophylactically treat or prevent an opportunistic fungal infection. In another specific embodiment, Therapeutics of the invention are used in any combination with ACYCLOVIR™ and/or FAMCICOLVIR™ to prophylactically treat or prevent an opportunistic herpes simplex virus type I and/or type II infection. In another specific embodiment, Therapeutics of the invention are used in any combination with PYRIMETHAMINE™ and/or LEUCOVORIN™ to prophylactically treat or prevent an opportunistic Toxoplasma gondii infection. In another specific embodiment, Therapeutics of the invention are used in any combination with LEUCOVORIN™ and/or NEUPOGEN™ to prophylactically treat or prevent an opportunistic bacterial infection.

[0994] In a further embodiment, the Therapeutics of the invention are administered in combination with an antibiotic agent. Antibiotic agents that may be administered with the Therapeutics of the invention include, but are not limited to, amoxicillin, beta-lactamases, aminoglycosides, beta-lactam (glycopeptide), beta-lactamases, Clindamycin, chloramphenicol, cephalosporins, ciprofloxacin, erythromycin, fluoroquinolones, macrolides, metronidazole, penicillins, quinolones, rapamycin, rifampin, streptomycin, sulfonamide, tetracyclines, trimethoprim, trimethoprim-sulfamethoxazole, and vancomycin.

[0995] In other embodiments, the Therapeutics of the invention are administered in combination with immunestimulants. Immunostimulants that may be administered in combination with the Therapeutics of the invention include, but are not limited to, levamisole (e.g., ERGAMISOL™), isoprinosine (e.g. INOSIPLEX™), interferons (e.g. interferon alpha), and interleukins (e.g., IL-2).

[0996] In other embodiments, Therapeutics of the invention are administered in combination with immunosuppressive agents. Immunosuppressive agents that may be administered in combination with the Therapeutics of the invention include, but are not limited to, steroids, cyclosporine, cyclosporine analogs, cyclophosphamide methylprednisone, prednisone, azathioprine, FK-506, 15-deoxyspergualin, and other immunosuppressive agents that act by suppressing the function of responding T cells. Other immunosuppressive agents that may be administered in combination with the Therapeutics of the invention include, but are not limited to, prednisolone, methotrexate, thalidomide, methoxsalen, rapamycin, leflunomide, mizoribine (BREDININ™), brequinar, deoxyspergualin, and azaspirane (SKF 105685), ORTHOCLONE OKT® 3 (muromonab-CD3), SANDIMMUNE™, NEORAL™, SANGDYA™ (cyclosporine), PROGRAF® (FK506, tacrolimus), CELLCEPT® (mycophenolate motefil, of which the active metabolite is mycophenolic acid), IMURAN™ (azathioprine), glucocorticosteroids, adrenocortical steroids such as DELTASONE™ (prednisone) and HYDELTRASOL™ (prednisolone), FOLEX™ and MEXATE™ (methotrxate), OXSORALEN-ULTRA™ (methoxsalen) and RAPAMUNE™ (sirolimus). In a specific embodiment, immunosuppressants may be used to prevent rejection of organ or bone marrow transplantation.

[0997] In an additional embodiment, Therapeutics of the invention are administered alone or in combination with one or more intravenous immune globulin preparations. Intravenous immune globulin preparations that may be administered with the Therapeutics of the invention include, but not limited to, GAMMAR™, IVEEGAM™, SANDOGLOBULIN™, GAMMAGARD S/D™, ATGAM™ (antithymocyte glubulin), and GAMIMUNE™. In a specific embodiment, Therapeutics of the invention are administered in combination with intravenous immune globulin preparations in transplantation therapy (e.g., bone marrow transplant).

[0998] In certain embodiments, the Therapeutics of the invention are administered alone or in combination with an anti-inflammatory agent. Anti-inflammatory agents that may be administered with the Therapeutics of the invention include, but are not limited to, corticosteroids (e.g. betamethasone, budesonide, cortisone, dexamethasone, hydrocortisone, methylprednisolone, prednisolone, prednisone, and triamcinolone), nonsteroidal anti-inflammatory drugs (e.g., diclofenac, diflunisal, etodolac, fenoprofen, floctafenine, flurbiprofen, ibuprofen, indomethacin, ketoprofen, meclofenamate, mefenamic acid, meloxicam, nabumetone, naproxen, oxaprozin, phenylbutazone, piroxicam, sulindac, tenoxicam, tiaprofenic acid, and tolmetin.), as well as antihistamines, aminoarylcarboxylic acid derivatives, arylacetic acid derivatives, arylbutyric acid derivatives, arylcarboxylic acids, arylpropionic acid derivatives, pyrazoles, pyrazolones, salicylic acid derivatives, thiazinecarboxamides, e-acetamidocaproic acid, S-adenosylmethionine, 3-amino-4-hydroxybutyric acid, amixetrine, bendazac, benzydamine, bucolome, difenpiramide, ditazol, emorfazone, guaiazulene, nabumetone, nimesulide, orgotein, oxaceprol, paranyline, perisoxal, pifoxime, proquazone, proxazole, and tenidap.

[0999] In an additional embodiment, the compositions of the invention are administered alone or in combination with an anti-angiogenic agent. Anti-angiogenic agents that may be administered with the compositions of the invention include, but are not limited to, Angiostatin (Entremed, Rockville, Md.), Troponin-1 (Boston Life Sciences, Boston, Mass.), anti-Invasive Factor, retinoic acid and derivatives thereof, paclitaxel (Taxol), Suramin, Tissue Inhibitor of Metalloproteinase-1, Tissue Inhibitor of Metalloproteinase-2, VEGI, Plasminogen Activator Inhibitor-1, Plasminogen Activator Inhibitor-2, and various forms of the lighter “d group” transition metals.

[1000] Lighter “d group” transition metals include, for example, vanadium, molybdenum, tungsten, titanium, niobium, and tantalum species. Such transition metal species may form transition metal complexes. Suitable complexes of the above-mentioned transition metal species include oxo transition metal complexes.

[1001] Representative examples of vanadium complexes include oxo vanadium complexes such as vanadate and vanadyl complexes. Suitable vanadate complexes include metavanadate and orthovanadate complexes such as, for example, ammonium metavanadate, sodium metavanadate, and sodium orthovanadate. Suitable vanadyl complexes include, for example, vanadyl acetylacetonate and vanadyl sulfate including vanadyl sulfate hydrates such as vanadyl sulfate mono- and trihydrates.

[1002] Representative examples of tungsten and molybdenum complexes also include oxo complexes. Suitable oxo tungsten complexes include tungstate and tungsten oxide complexes. Suitable tungstate complexes include ammonium tungstate, calcium tungstate, sodium tungstate dihydrate, and tungstic acid. Suitable tungsten oxides include tungsten (IV) oxide and tungsten (VI) oxide. Suitable oxo molybdenum complexes include molybdate, molybdenum oxide, and molybdenyl complexes. Suitable molybdate complexes include ammonium molybdate and its hydrates, sodium molybdate and its hydrates, and potassium molybdate and its hydrates. Suitable molybdenum oxides include molybdenum (VI) oxide, molybdenum (VI) oxide, and molybdic acid. Suitable molybdenyl complexes include, for example, molybdenyl acetylacetonate. Other suitable tungsten and molybdenum complexes include hydroxo derivatives derived from, for example, glycerol, tartaric acid, and sugars.

[1003] A wide variety of other anti-angiogenic factors may also be utilized within the context of the present invention. Representative examples include, but are not limited to, platelet factor 4; protamine sulphate; sulphated chitin derivatives (prepared from queen crab shells), (Murata et al., Cancer Res. 51:22-26, (1991)); Sulphated Polysaccharide Peptidoglycan Complex (SP-PG) (the function of this compound may be enhanced by the presence of steroids such as estrogen, and tamoxifen citrate); Staurosporine; modulators of matrix metabolism, including for example, proline analogs, cishydroxyproline, d,L-3,4-dehydroproline, Thiaproline, alpha,alpha-dipyridyl, aminopropionitrile fumarate; 4-propyl-5-(4-pyridinyl)-2(3H)-oxazolone; Methotrexate; Mitoxantrone; Heparin; Interferons; 2 Macroglobulin-serum; ChIMP-3 (Pavloff et al., J. Bio. Chem. 267:17321-17326, (1992)); Chymostatin (Tomkinson et al., Biochem J. 286:475-480, (1992)); Cyclodextrin Tetradecasulfate; Eponemycin; Camptothecin; Fumagillin (Ingber et al., Nature 348:555-557, (1990)); Gold Sodium Thiomalate (“GST”; Matsubara and Ziff, J. Clin. Invest. 79:1440-1446, (1987)); anticollagenase-serum; alpha2-antiplasmin (Holmes et al., J. Biol. Chem. 262(4):1659-1664, (1987)); Bisantrene (National Cancer Institute); Lobenzarit disodium (N-(2)-carboxyphenyl-4- chloroanthronilic acid disodium or “CCA”; (Takeuchi et al., Agents Actions 36:312-316, (1992)); and metalloproteinase inhibitors such as BB94.

[1004] Additional anti-angiogenic factors that may also be utilized within the context of the present invention include Thalidomide, (Celgene, Warren, NJ); Angiostatic steroid; AGM-1470 (H. Brem and J. Folkman J Pediatr. Surg. 28:445-51 (1993)); an integrin alpha v beta 3 antagonist (C. Storgard et al., J Clin. Invest. 103:47-54 (1999)); carboxynaminolmidazole; Carboxyamidotriazole (CAI) (National Cancer Institute, Bethesda, Md.); Conbretastatin A-4 (CA4P) (OXiGENE, Boston, Mass.); Squalamine (Magainin Pharmaceuticals, Plymouth Meeting, Pa.); TNP-470, (Tap Pharmaceuticals, Deerfield, Ill.); ZD-0101 AstraZeneca (London, UK); APRA (CT2584); Benefin, Byrostatin-1 (SC339555); CGP-41251 (PKC 412); CM101; Dexrazoxane (ICRF187); DMXAA; Endostatin; Flavopridiol; Genestein; GTE; ImmTher; Iressa (ZD1839); Octreotide (Somatostatin); Panretin; Penacillamine; Photopoint; PI-88; Prinomastat (AG-3340) Purlytin; Suradista (FCE26644); Tamoxifen (Nolvadex); Tazarotene; Tetrathiomolybdate; Xeloda (Capecitabine); and 5-Fluorouracil.

[1005] Anti-angiogenic agents that may be administed in combination with the compounds of the invention may work through a variety of mechanisms including, but not limited to, inhibiting proteolysis of the extracellular matrix, blocking the function of endothelial cell-extracellular matrix adhesion molecules, by antagonizing the function of angiogenesis inducers such as growth factors, and inhibiting integrin receptors expressed on proliferating endothelial cells. Examples of anti-angiogenic inhibitors that interfere with extracellular matrix proteolysis and which may be administered in combination with the compositons of the invention include, but are not lmited to, AG-3340 (Agouron, La Jolla, Calif.), BAY-12-9566 (Bayer, West Haven, Conn.), BMS-275291 (Bristol Myers Squibb, Princeton, NJ), CGS-27032A (Novartis, East Hanover, N.J.), Marimastat (British Biotech, Oxford, UK), and Metastat (Aetema, St-Foy, Quebec). Examples of anti-angiogenic inhibitors that act by blocking the function of endothelial cell-extracellular matrix adhesion molecules and which may be administered in combination with the compositons of the invention include, but are not lmited to, EMD-121974 (Merck KcgaA Darmstadt, Germany) and Vitaxin (Ixsys, La Jolla, CA/Medimmune, Gaithersburg, Md.). Examples of anti-angiogenic agents that act by directly antagonizing or inhibiting angiogenesis inducers and which may be administered in combination with the compositons of the invention include, but are not Imited to, Angiozyme (Ribozyme, Boulder, Colo.), Anti-VEGF antibody (Genentech, S. San Francisco, Calif.), PTK-787/ZK-225846 (Novartis, Basel, Switzerland), SU-101 (Sugen, S. San Francisco, Calif.), SU-5416 (Sugen/Pharmacia Upjohn, Bridgewater, N.J.), and SU-6668 (Sugen). Other anti-angiogenic agents act to indirectly inhibit angiogenesis. Examples of indirect inhibitors of angiogenesis which may be administered in combination with the compositons of the invention include, but are not limited to, IM-862 (Cytran, Kirkland, Wash.), Interferon-alpha, IL-12 (Roche, Nutley, N.J.), and Pentosan polysulfate (Georgetown University, Washington, D.C.).

[1006] In particular embodiments, the use of compositions of the invention in combination with anti-angiogenic agents is contemplated for the treatment, prevention, and/or amelioration of an autoimmune disease, such as for example, an autoimmune disease described herein.

[1007] In a particular embodiment, the use of compositions of the invention in combination with anti-angiogenic agents is contemplated for the treatment, prevention, and/or amelioration of arthritis. In a more particular embodiment, the use of compositions of the invention in combination with anti-angiogenic agents is contemplated for the treatment, prevention, and/or amelioration of rheumatoid arthritis.

[1008] In another embodiment, the polynucleotides encoding a polypeptide of the present invention are administered in combination with an angiogenic protein, or polynucleotides encoding an angiogenic protein. Examples of angiogenic proteins that may be administered with the compositions of the invention include, but are not limited to, acidic and basic fibroblast growth factors, VEGF-1, VEGF-2, VEGF-3, epidermal growth factor alpha and beta, platelet-derived endothelial cell growth factor, platelet-derived growth factor, tumor necrosis factor alpha, hepatocyte growth factor, insulin-like growth factor, colony stimulating factor, macrophage colony stimulating factor, granulocyte/macrophage colony stimulating factor, and nitric oxide synthase.

[1009] In additional embodiments, compositions of the invention are administered in combination with a chemotherapeutic agent. Chemotherapeutic agents that may be administered with the Therapeutics of the invention include, but are not limited to alkylating agents such as nitrogen mustards (for example, Mechlorethamine, cyclophosphamide, Cyclophosphamide Ifosfamide, Melphalan (L-sarcolysin), and Chlorambucil), ethylenimines and methylmelamines (for example, Hexamethylmelamine and Thiotepa), alkyl sulfonates (for example, Busulfan), nitrosoureas (for example, Carmustine (BCNU), Lomustine (CCNU), Semustine (methyl-CCNU), and Streptozocin (streptozotocin)), triazenes (for example, Dacarbazine (DTIC; dimethyltriazenoimidazolecarboxamide)), folic acid analogs (for example, Methotrexate (amethopterin)), pyrimidine analogs (for example, Fluorouacil (5-fluorouracil; 5-FU), Floxuridine (fluorodeoxyuridine; FudR), and Cytarabine (cytosine arabinoside)), purine analogs and related inhibitors (for example, Mercaptopurine (6-mercaptopurine; 6-MP), Thioguanine (6-thioguanine; TG), and Pentostatin (2′-deoxycoformycin)), vinca alkaloids (for example, Vinblastine (VLB, vinblastine sulfate)) and Vincristine (vincristine sulfate)), epipodophyllotoxins (for example, Etoposide and Teniposide), antibiotics (for example, Dactinomycin (actinomycin D), Daunorubicin (daunomycin; rubidomycin), Doxorubicin, Bleomycin, Plicamycin (mithramycin), and Mitomycin (mitomycin C), enzymes (for example, L-Asparaginase), biological response modifiers (for example, Interferon-alpha and interferon-alpha-2b), platinum coordination compounds (for example, Cisplatin (cis-DDP) and Carboplatin), anthracenedione (Mitoxantrone), substituted ureas (for example, Hydroxyurea), methylhydrazine derivatives (for example, Procarbazine (N-methylhydrazine; M1H), adrenocorticosteroids (for example, Prednisone), progestins (for example, Hydroxyprogesterone caproate, Medroxyprogesterone, Medroxyprogesterone acetate, and Megestrol acetate), estrogens (for example, Diethylstilbestrol (DES), Diethylstilbestrol diphosphate, Estradiol, and Ethinyl estradiol), antiestrogens (for example, Tamoxifen), androgens (Testosterone proprionate, and Fluoxymesterone), antiandrogens (for example, Flutamide), gonadotropin-releasing horomone analogs (for example, Leuprolide), other hormones and hormone analogs (for example, methyltestosterone, estramustine, estramustine phosphate sodium, chlorotrianisene, and testolactone), and others (for example, dicarbazine, glutamic acid, and mitotane).

[1010] In one embodiment, the compositions of the invention are administered in combination with one or more of the following drugs: infliximab (also known as Remicade™ Centocor, Inc.), Trocade (Roche, RO-32-3555), Leflunomide (also known as Arava™ from Hoechst Marion Roussel), Kineret™ (an IL-1 Receptor antagonist also known as Anakinra from Amgen, Inc.)

[1011] In a specific embodiment, compositions of the invention are administered in combination with CHOP (cyclophosphamide, doxorubicin, vincristine, and prednisone) or combination of one or more of the components of CHOP. In one embodiment, the compositions of the invention are administered in combination with anti-CD20 antibodies, human monoclonal anti-CD20 antibodies. In another embodiment, the compositions of the invention are administered in combination with anti-CD20 antibodies and CHOP, or anti-CD20 antibodies and any combination of one or more of the components of CHOP, particularly cyclophosphamide and/or prednisone. In a specific embodiment, compositions of the invention are administered in combination with Rituximab. In a further embodiment, compositions of the invention are administered with Rituximab and CHOP, or Rituximab and any combination of one or more of the components of CHOP, particularly cyclophosphamide and/or prednisone. In a specific embodiment, compositions of the invention are administered in combination with tositumomab. In a further embodiment, compositions of the invention are administered with tositumomab and CHOP, or tositumomab and any combination of one or more of the components of CHOP, particularly cyclophosphamide and/or prednisone. The anti-CD20 antibodies may optionally be associated with radioisotopes, toxins or cytotoxic prodrugs.

[1012] In another specific embodiment, the compositions of the invention are administered in combination Zevalin . In a further embodiment, compositions of the invention are administered with Zevalin” and CHOP, or Zevalin” and any combination of one or more of the components of CHOP, particularly cyclophosphamide and/or prednisone. Zevalin™ may be associated with one or more radisotopes. Particularly preferred isotopes are ⁹⁰Y and ¹¹¹In.

[1013] In an additional embodiment, the Therapeutics of the invention are administered in combination with cytokines. Cytokines that may be administered with the Therapeutics of the invention include, but are not limited to, IL2, IL3, IL4, IL5, IL6, IL7, ILIO, IL12, IL13, IL15, anti-CD40, CD40L, IFN-gamma and TNF-alpha. In another embodiment, Therapeutics of the invention may be administered with any interleukin, including, but not limited to, IL-lalpha, IL-lbeta, IL-2, IL-3, IL-4, IL-5, IL-6, IL-7, IL-8, IL-9, IL-10, IL-11, IL-12, IL-13, IL-14, IL-15, IL-16, IL-17, IL-18, IL-19, IL-20, and IL-21.

[1014] In one embodiment, the Therapeutics of the invention are administered in combination with members of the TNF family. TNF, TNF-related or TNF-like molecules that may be administered with the Therapeutics of the invention include, but are not limited to, soluble forms of TNF-alpha, lymphotoxin-alpha (LT-alpha, also known as TNF-beta), LT-beta (found in complex heterotrimer LT-alpha2-beta), OPGL, FasL, CD27L, CD30L, CD40L, 4-1BBL, DcR3, OX40L, TNF-gamma (International Publication No. WO 96/14328), AIM-I (International Publication No. WO 97/33899), endokine-alpha (International Publication No. WO 98/07880), OPG, and neutrokine-alpha (International Publication No. WO 98/18921, OX40, and nerve growth factor (NGF), and soluble forms of Fas, CD30, CD27, CD40 and 4-IBB, TR2 (International Publication No. WO 96/34095), DR3 (International Publication No. WO 97/33904), DR4 (International Publication No. WO 98/32856), TR5 (International Publication No. WO 98/30693), TRANK, TR9 (International Publication No. WO 98/56892),TR10 (International Publication No. WO 98/54202), 312C2 (International Publication No. WO 98/06842), and TR12, and soluble forms CD154, CD70, and CD153.

[1015] In an additional embodiment, the Therapeutics of the invention are administered in combination with angiogenic proteins. Angiogenic proteins that may be administered with the Therapeutics of the invention include, but are not limited to, Glioma Derived Growth Factor (GDGF), as disclosed in European Patent Number EP-399816; Platelet Derived Growth Factor-A (PDGF-A), as disclosed in European Patent Number EP-6821 10; Platelet Derived Growth Factor-B (PDGF-B), as disclosed in European Patent Number EP-282317; Placental Growth Factor (P1GF), as disclosed in International Publication Number WO 92/06194; Placental Growth Factor-2 (P1GF-2), as disclosed in Hauser et al., Growth Factors, 4:259-268 (1993); Vascular Endothelial Growth Factor (VEGF), as disclosed in International Publication Number WO 90/13649; Vascular Endothelial Growth Factor-A (VEGF-A), as disclosed in European Patent Number EP-506477; Vascular Endothelial Growth Factor-2 (VEGF-2), as disclosed in International Publication Number WO 96/39515; Vascular Endothelial Growth Factor B (VEGF-3); Vascular Endothelial Growth Factor B-186 (VEGF-B186), as disclosed in International Publication Number WO 96/26736; Vascular Endothelial Growth Factor-D (VEGF-D), as disclosed in International Publication Number WO 98/02543; Vascular Endothelial Growth Factor-D (VEGF-D), as disclosed in International Publication Number WO 98/07832; and Vascular Endothelial Growth Factor-E (VEGF-E), as disclosed in German Patent Number DE19639601. The above mentioned references are herein incorporated by reference in their entireties.

[1016] In an additional embodiment, the Therapeutics of the invention are administered in combination with Fibroblast Growth Factors. Fibroblast Growth Factors that may be administered with the Therapeutics of the invention include, but are not limited to, FGF-1, FGF-2, FGF-3, FGF-4, FGF-5, FGF-6, FGF-7, FGF-8, FGF-9, FGF-10, FGF-1, FGF-12, FGF-13, FGF-14, and FGF-15.

[1017] In an additional embodiment, the Therapeutics of the invention are administered in combination with hematopoietic growth factors. Hematopoietic growth factors that may be administered with the Therapeutics of the invention include, but are not limited to, granulocyte macrophage colony stimulating factor (GM-CSF) (sargramostim, LEUKINE™, PROKINE™), granulocyte colony stimulating factor (G-CSF) (filgrastim, NEUPOGEN™), macrophage colony stimulating factor (M-CSF, CSF-1) erythropoietin (epoetin alfa, EPOGEN™, PROCRIT™), stem cell factor (SCF, c-kit ligand, steel factor), megakaryocyte colony stimulating factor, PIXY321 (a GMCSF/IL-3 fusion protein), interleukins, especially any one or more of IL-1 through IL-12, interferon-gamma, or thrombopoietin.

[1018] In certain embodiments, Therapeutics of the present invention are administered in combination with adrenergic blockers, such as, for example, acebutolol, atenolol, betaxolol, bisoprolol, carteolol, labetalol, metoprolol, nadolol, oxprenolol, penbutolol, pindolol, propranolol, sotalol, and timolol.

[1019] In another embodiment, the Therapeutics of the invention are administered in combination with an antiarrhythmic drug (e.g., adenosine, amidoarone, bretylium, digitalis, digoxin, digitoxin, diliazem, disopyramide, esmolol, flecainide, lidocaine, mexiletine, moricizine, phenytoin, procainamide, N-acetyl procainamide, propafenone, propranolol, quinidine, sotalol, tocainide, and verapamil).

[1020] In another embodiment, the Therapeutics of the invention are administered in combination with diuretic agents, such as carbonic anhydrase-inhibiting agents (e.g., acetazolamide, dichlorphenamide, and methazolamide), osmotic diuretics (e.g., glycerin, isosorbide, mannitol, and urea), diuretics that inhibit Na⁺—K⁺—2Cl⁻ symport (e.g., furosemide, bumetanide, azosemide, piretanide, tripamide, ethacrynic acid, muzolimine, and torsemide), thiazide and thiazide-like diuretics (e.g., bendroflumethiazide, benzthiazide, chlorothiazide, hydrochlorothiazide, hydroflumethiazide, methyclothiazide, polythiazide, trichormethiazide, chlorthalidone, indapamide, metolazone, and quinethazone), potassium sparing diuretics (e.g., amiloride and triamterene), and mineralcorticoid receptor antagonists (e.g., spironolactone, canrenone, and potassium canrenoate).

[1021] In one embodiment, the Therapeutics of the invention are administered in combination with treatments for endocrine and/or hormone imbalance disorders. Treatments for endocrine and/or hormone imbalance disorders include, but are not limited to, ¹²⁷I, radioactive isotopes of iodine such as ¹³¹I and ¹²³I; recombinant growth hormone, such as HUMATROPE™ (recombinant somatropin); growth hormone analogs such as PROTROPIN™ (somatrem); dopamine agonists such as PARLODEL™ (bromocriptine); somatostatin analogs such as SANDOSTATIN™ (octreotide); gonadotropin preparations such as PREGNYL™, A.P.L.™ and PROFASI™ (chorionic gonadotropin (CG)), PERGONAL™ (menotropins), and METRODIN™ (urofollitropin (uFSH)); synthetic human gonadotropin releasing hormone preparations such as FACTREL™ and LUTREPULSE™ (gonadorelin hydrochloride); synthetic gonadotropin agonists such as LUPRON™ (leuprolide acetate), SUPPRELIN™ (histrelin acetate), SYNAREL” (nafarelin acetate), and ZOLADEX™ (goserelin acetate); synthetic preparations of thyrotropin-releasing hormone such as RELEFACT TRH™ and THYPINONE™ (protirelin); recombinant human TSH such as THYROGEN™; synthetic preparations of the sodium salts of the natural isomers of thyroid hormones such as L-T₄™, SYNTHROID™ and LEVOTHROID™ (levothyroxine sodium), L-T₃™, CYTOMEL™ and TRIOSTAT™ (liothyroine sodium), and THYROLAR™ (liotrix); antithyroid compounds such as 6-n-propylthiouracil (propylthiouracil), 1-methyl-2-mercaptoimidazole and TAPAZOLE™ (methimazole), NEO-MERCAZOLE™ (carbimazole); beta-adrenergic receptor antagonists such as propranolol and esmolol; Ca²⁺ channel blockers; dexamethasone and iodinated radiological contrast agents such as TELEPAQUE™ (iopanoic acid) and ORAGRAFIN™ (sodium ipodate).

[1022] Additional treatments for endocrine and/or hormone imbalance disorders include, but are not limited to, estrogens or congugated estrogens such as ESTRACE™ (estradiol), ESTINYL™ (ethinyl estradiol), PREMARIN™, ESTRATAB , ORTHO-EST™, OGEN™ and estropipate (estrone), ESTROVIS™ (quinestrol), ESTRADERM™ (estradiol), DELESTROGEN™ and VALERGEN™ (estradiol valerate), DEPO-ESTRADIOL CYPIONATE™ and ESTROJECT LA™ (estradiol cypionate); antiestrogens such as NOLVADEX™ (tamoxifen), SEROPHENE™ and CLOMID™ (clomiphene); progestins such as DURALUTIN™ (hydroxyprogesterone caproate), MPA™ and DEPO-PROVERA™ (medroxyprogesterone acetate), PROVERA™ and CYCRIN™ (MPA), MEGACE™ (megestrol acetate), NORLUTIN™ (norethindrone), and NORLUTATE™ and AYGESTIN™ (norethindrone acetate); progesterone implants such as NORPLANT SYSTEM™ (subdermal implants of norgestrel); antiprogestins such as RU 486™ (mifepristone); hormonal contraceptives such as ENOVID™ (norethynodrel plus mestranol), PROGESTASERT™ (intrauterine device that releases progesterone), LOESTRIN™, BREVICON™, MODICON™, GENORA™, NELONA™, NORINYL™, OVACON-35™ and OVACON-50™ (ethinyl estradiol/norethindrone), LEVLEN™, NORDETTE™, TRI-LEVLEN™ and TRIPHASIL-21™ (ethinyl estradiol/levonorgestrel) LO/OVRAL™ and OVRAL™ (ethinyl estradiol/norgestrel), DEMULEN™ (ethinyl estradiol/ethynodiol diacetate), NORINYL™, ORTHO-NOVUM™, NORETHIN™, GENORA™, and NELOVA™ (norethindrone/mestranol), DESOGEN™ and ORTHO-CEPT™ (ethinyl estradiol/desogestrel), ORTHO-CYCLEN™ and ORTHO-TRICYCLEN™ (ethinyl estradiol/norgestimate), MICRONOR™ and NOR-QD™ (norethindrone), and OVRETTE™ (norgestrel).

[1023] Additional treatments for endocrine and/or hormone imbalance disorders include, but are not limited to, testosterone esters such as methenolone acetate and testosterone undecanoate; parenteral and oral androgens such as TESTOJECT-50™ (testosterone), TESTEX™ (testosterone propionate), DELATESTRYL™ (testosterone enanthate), DEPO-TESTOSTERONE™ (testosterone cypionate), DANOCRINE™ (danazol), HALOTESTIN™ (fluoxymesterone), ORETON METHYL™, TESTRED™ and VIRILON™ (methyltestosterone), and OXANDRIN™ (oxandrolone); testosterone transdermal systems such as TESTODERM™; androgen receptor antagonist and 5-alpha-reductase inhibitors such as ANDROCUR™ (cyproterone acetate), EULEXIN™ (flutamide), and PROSCAR™ (finasteride); adrenocorticotropic hormone preparations such as CORTROSYN^{T}M (cosyntropin); adrenocortical steroids and their synthetic analogs such as ACLOVATE™ (alclometasone dipropionate), CYCLOCORT™ (amcinonide), BECLOVENT™ and VANCERIL™ (beclomethasone dipropionate), CELESTONE™ (betamethasone), BENISONE™ and UTICORT™ (betamethasone benzoate), DIPROSONE™ (betamethasone dipropionate), CELESTONE PHOSPHATE™ (betamethasone sodium phosphate), CELESTONE SOLUSPAN™ (betamethasone sodium phosphate and acetate), BETA-VAL™ and VALISONE™ (betamethasone valerate), TEMOVATE™ (clobetasol propionate), CLODERM™ (clocortolone pivalate), CORTEF™ and HYDROCORTONE™ (cortisol (hydrocortisone)), HYDROCORTONE ACETATE™ (cortisol (hydrocortisone) acetate), LOCOID™ (cortisol (hydrocortisone) butyrate), HYDROCORTONE PHOSPHATE™ (cortisol (hydrocortisone) sodium phosphate), A-HYDROCORT™ and SOLU CORTEF™ (cortisol (hydrocortisone) sodium succinate), WESTCORT™ (cortisol (hydrocortisone) valerate), CORTISONE ACETATE™ (cortisone acetate), DESOWEN™ and TRIDESILON™ (desonide), TOPICORT™ (desoximetasone), DECADRON ^{T} (dexamethasone), DECADRON LA™ (dexamethasone acetate), DECADRON PHOSPHATE™ and HEXADROL PHOSPHATE™ (dexamethasone sodium phosphate), FLORONE™ and MAXIFLOR™ (diflorasone diacetate), FLORINEF ACETATE™ (fludrocortisone acetate), AEROBID™ and NASALIDE™ (flunisolide), FLUONID™ and SYNALAR™ (fluocinolone acetonide), LIDEX™ (fluocinonide), FLUOR-OP™ and FML™ (fluorometholone), CORDRAN™ (flurandrenolide), HALOG™ (halcinonide), HMS LIZUIFIL™ (medrysone), MEDROL™ (methylprednisolone), DEPO-MEDROL™ and MEDROL ACETATE™ (methylprednisone acetate), A-METHAPRED™ and SOLUMEDROL™ (methylprednisolone sodium succinate), ELOCON“(mometasone furoate), HALDRONE™ (paramethasone acetate), DELTA-CORTEF™ (prednisolone), ECONOPRED™ (prednisolone acetate), HYDELTRASOL™ (prednisolone sodium phosphate), HYDELTRA-T.B.A™ (prednisolone tebutate), DELTASONE™ (prednisone), ARISTOCOR™ and KENACORT™ (triamcinolone), KENALOG™ (triamcinolone acetonide), ARISTOCORT™ and KENACORT DIACETATE™ (triamcinolone diacetate), and ARISTOSPAN™ (triamcinolone hexacetonide); inhibitors of biosynthesis and action of adrenocortical steroids such as CYTADREN™ (aminoglutethimide), NIZORAL™ (ketoconazole), MODRASTANE™ (trilostane), and METOPIRONE™ (metyrapone); bovine, porcine or human insulin or mixtures thereof; insulin analogs; recombinant human insulin such as HUMULIN™ and NOVOLIN™; oral hypoglycemic agents such as ORAMIDE™ and ORINASE™ (tolbutamide), DIABINESE” (chlorpropamide), TOLAMIDE™ and TOLINASE™ (tolazamide), DYMELOR™ (acetohexamide), glibenclamide, MICRONASE™, DIBETA™ and GLYNASE™ (glyburide), GLUCOTROL™ (glipizide), and DIAMICRON™ (gliclazide), GLUCOPHAGE™ (metformin), ciglitazone, pioglitazone, and alpha-glucosidase inhibitors; bovine or porcine glucagon; somatostatins such as SANDOSTATIN™ (octreotide); and diazoxides such as PROGLYCEM™ (diazoxide).

[1024] In one embodiment, the Therapeutics of the invention are administered in combination with treatments for uterine motility disorders. Treatments for uterine motility disorders include, but are not limited to, estrogen drugs such as conjugated estrogens (e.g., PREMARIN® and ESTRATAB®), estradiols (e.g., CLIMARA® and ALORA®), estropipate, and chlorotrianisene; progestin drugs (e.g., AMENO (medroxyprogesterone), MICRONOR® (norethidrone acetate), PROMETRIUM® progesterone, and megestrol acetate); and estrogen/progesterone combination therapies such as, for example, conjugated estrogens/medroxyprogesterone (e.g., PREMPRO™ and PREMPHASE®) and norethindrone acetate/ethinyl estsradiol (e.g., FEMHRT™).

[1025] In an additional embodiment, the Therapeutics of the invention are administered in combination with drugs effective in treating iron deficiency and hypochromic anemias, including but not limited to, ferrous sulfate (iron sulfate, FEOSOL™), ferrous fumarate (e.g., FEOSTAT™), ferrous gluconate (e.g., FERGON™), polysaccharide-iron complex (e.g., NIFEREX™), iron dextran injection (e.g., INFED™), cupric sulfate, pyroxidine, riboflavin, Vitamin B₁₂, cyancobalamin injection (e.g., REDISOLTM, RUBRAMIN PC™), hydroxocobalamin, folic acid (e.g., FOLVITE™), leucovorin (folinic acid, 5CHOH4PteGlu, citrovorum factor) or WELLCOVORIN (Calcium salt of leucovorin), transferrin or ferritin.

[1026] In certain embodiments, the Therapeutics of the invention are administered in combination with agents used to treat psychiatric disorders. Psychiatric drugs that may be administered with the Therapeutics of the invention include, but are not limited to, antipsychotic agents (e.g., chlorpromazine, chlorprothixene, clozapine, fluphenazine, haloperidol, loxapine, mesoridazine, molindone, olanzapine, perphenazine, pimozide, quetiapine, risperidone, thioridazine, thiothixene, trifluoperazine, and triflupromazine), antimanic agents (e.g., carbamazepine, divalproex sodium, lithium carbonate, and lithium citrate), antidepressants (e.g., amitriptyline, amoxapine, bupropion, citalopram, clomipramine, desipramine, doxepin, fluvoxamine, fluoxetine, imipramine, isocarboxazid, maprotiline, mirtazapine, nefazodone, nortriptyline, paroxetine, phenelzine, protriptyline, sertraline, tranylcypromine, trazodone, trimipramine, and venlafaxine), antianxiety agents (e.g., alprazolam, buspirone, chlordiazepoxide, clorazepate, diazepam, halazepam, lorazepam, oxazepam, and prazepam), and stimulants (e.g., d-amphetamine, methylphenidate, and pemoline).

[1027] In other embodiments, the Therapeutics of the invention are administered in combination with agents used to treat neurological disorders. Neurological agents that may be administered with the Therapeutics of the invention include, but are not limited to, antiepileptic agents (e.g., carbamazepine, clonazepam, ethosuximide, phenobarbital, phenytoin, primidone, valproic acid, divalproex sodium, felbamate, gabapentin, lamotrigine, levetiracetam, oxcarbazepine, tiagabine, topiramate, zonisamide, diazepam, lorazepam, and clonazepam), antiparkinsonian agents (e.g., levodopa/carbidopa, selegiline, amantidine, bromocriptine, pergolide, ropinirole, pramipexole, benztropine; biperiden; ethopropazine; procyclidine; trihexyphenidyl, tolcapone), and ALS therapeutics (e.g. riluzole).

[1028] In another embodiment, Therapeutics of the invention are administered in combination with vasodilating agents and/or calcium channel blocking agents. Vasodilating agents that may be administered with the Therapeutics of the invention include, but are not limited to, Angiotensin Converting Enzyme (ACE) inhibitors (e.g., papaverine, isoxsuprine, benazepril, captopril, cilazapril, enalapril, enalaprilat, fosinopril, lisinopril, moexipril, perindopril, quinapril, ramipril, spirapril, trandolapril, and nylidrin), and nitrates (e.g., isosorbide dinitrate, isosorbide mononitrate, and nitroglycerin). Examples of calcium channel blocking agents that may be administered in combination with the Therapeutics of the invention include, but are not limited to amlodipine, bepridil, diltiazem, felodipine, flunarizine, isradipine, nicardipine, nifedipine, nimodipine, and verapamil.

[1029] In certain embodiments, the Therapeutics of the invention are administered in combination with treatments for gastrointestinal disorders. Treatments for gastrointestinal disorders that may be administered with the Therapeutic of the invention include, but are not limited to, H₂ histamine receptor antagonists (e.g., TAGAMET™ (cimetidine), ZANTAC™ (ranitidine), PEPCID™ (famotidine), and AXID™ (nizatidine)); inhibitors of H⁺, K⁺ ATPase (e.g., PREVACID™ (lansoprazole) and PRILOSEC™ (omeprazole)); Bismuth compounds (e.g., PEPTO-BISMOL™ (bismuth subsalicylate) and DE-NOL™ (bismuth subcitrate)); various antacids; sucralfate; prostaglandin analogs (e.g. CYTOTEC™ (misoprostol)); muscarinic cholinergic antagonists; laxatives (e.g., surfactant laxatives, stimulant laxatives, saline and osmotic laxatives); antidiarrheal agents (e.g., LOMOTIL™ (diphenoxylate), MOTOFEN™ (diphenoxin), and IMODIUM™ (loperamide hydrochloride)), synthetic analogs of somatostatin such as SANDOSTATIN™ (octreotide), antiemetic agents (e.g., ZOFRAN™ (ondansetron), KYTRIL™ (granisetron hydrochloride), tropisetron, dolasetron, metoclopramide, chlorpromazine, perphenazine, prochlorperazine, promethazine, thiethylperazine, triflupromazine, domperidone, haloperidol, droperidol, trimethobenzamide, dexamethasone, methylprednisolone, dronabinol, and nabilone); D2 antagonists (e.g., metoclopramide, trimethobenzamide and chlorpromazine); bile salts; chenodeoxycholic acid; ursodeoxycholic acid; and pancreatic enzyme preparations such as pancreatin and pancrelipase.

[1030] In additional embodiments, the Therapeutics of the invention are administered in combination with other therapeutic or prophylactic regimens, such as, for example, radiation therapy.

### Example 14

### Method of Treating Decreased Levels of the Polypeptide

[1031] The present invention relates to a method for treating an individual in need of an increased level of a polypeptide of the invention in the body comprising administering to such an individual a composition comprising a therapeutically effective amount of an agonist of the invention (including polypeptides of the invention). Moreover, it will be appreciated that conditions caused by a decrease in the standard or normal expression level of a polypeptide of the present invention in an individual can be treated by administering the agonist or antagonist of the present invention. Thus, the invention also provides a method of treatment of an individual in need of an increased level of the polypeptide comprising administering to such an individual a Therapeutic comprising an amount of the agonist or antagonist to increase the activity level of the polypeptide in such an individual.

[1032] For example, a patient with decreased levels of a polypeptide receives a daily dose 0.1-100 ug/kg of the agonist or antagonist for six consecutive days. The exact details of the dosing scheme, based on administration and formulation, are provided in Example 13.

### Example 15

### Method of Treating Increased Levels of the Polypeptide

[1033] The present invention also relates to a method of treating an individual in need of a decreased level of a polypeptide of the invention in the body comprising administering to such an individual a composition comprising a therapeutically effective amount of an antagonist of the invention (including polypeptides and antibodies of the invention).

[1034] In one example, antisense technology is used to inhibit production of a polypeptide of the present invention. This technology is one example of a method of decreasing levels of a polypeptide, due to a variety of etiologies, such as cancer.

[1035] For example, a patient diagnosed with abnormally increased levels of a polypeptide is administered intravenously antisense polynucleotides at 0.5, 1.0, 1.5, 2.0 and 3.0 mg/kg day for 21 days. This treatment is repeated after a 7-day rest period if the treatment was well tolerated. The antisense polynucleotides of the present invention can be formulated using techniques and formulations described herein (e.g. see Example 13), or otherwise known in the art.

### Example 16

### Method of Treatment Using Gene Therapy-ex Vivo

[1036] One method of gene therapy transplants fibroblasts, which are capable of expressing a polypeptide, onto a patient. Generally, fibroblasts are obtained from a subject by skin biopsy. The resulting tissue is placed in tissue-culture medium and separated into small pieces. Small chunks of the tissue are placed on a wet surface of a tissue culture flask, approximately ten pieces are placed in each flask. The flask is turned upside down, closed tight and left at room temperature over night. After 24 hours at room temperature, the flask is inverted and the chunks of tissue remain fixed to the bottom of the flask and fresh media (e.g., Ham's F12 media, with 10% FBS, penicillin and streptomycin) is added. The flasks are then incubated at 37 degree C for approximately one week.

[1037] At this time, fresh media is added and subsequently changed every several days. After an additional two weeks in culture, a monolayer of fibroblasts emerge. The monolayer is trypsinized and scaled into larger flasks.

[1038] pMV-7 (Kirschmeier, P. T. et al., DNA, 7:219-25 (1988)), flanked by the long terminal repeats of the Moloney murine sarcoma virus, is digested with EcoRi and HindIII and subsequently treated with calf intestinal phosphatase. The linear vector is fractionated on agarose gel and purified, using glass beads.

[1039] The cDNA encoding a polypeptide of the present invention can be amplified using PCR primers which correspond to the 5′ and 3′ end sequences respectively as set forth in Example 1 using primers and having appropriate restriction sites and initiation/stop codons, if necessary. Preferably, the 5′ primer contains an EcoRI site and the 3′ primer includes a HindIII site. Equal quantities of the Moloney murine sarcoma virus linear backbone and the amplified EcoRI and HindIII fragment are added together, in the presence of T4 DNA ligase. The resulting mixture is maintained under conditions appropriate for ligation of the two fragments. The ligation mixture is then used to transform bacteria HB101, which are then plated onto agar containing kanamycin for the purpose of confirming that the vector has the gene of interest properly inserted.

[1040] The amphotropic pA317 or GP+am12 packaging cells are grown in tissue culture to confluent density in Dulbecco's Modified Eagles Medium (DMEM) with 10% calf serum (CS), penicillin and streptomycin. The MSV vector containing the gene is then added to the media and the packaging cells transduced with the vector. The packaging cells now produce infectious viral particles containing the gene (the packaging cells are now referred to as producer cells).

[1041] Fresh media is added to the transduced producer cells, and subsequently, the media is harvested from a 10 cm plate of confluent producer cells. The spent media, containing the infectious viral particles, is filtered through a millipore filter to remove detached producer cells and this media is then used to infect fibroblast cells. Media is removed from a sub-confluent plate of fibroblasts and quickly replaced with the media from the producer cells. This media is removed and replaced with fresh media. If the titer of virus is high, then virtually all fibroblasts will be infected and no selection is required. If the titer is very low, then it is necessary to use a retroviral vector that has a selectable marker, such as neo or his. Once the fibroblasts have been efficiently infected, the fibroblasts are analyzed to determine whether protein is produced.

[1042] The engineered fibroblasts are then transplanted onto the host, either alone or after having been grown to confluence on cytodex 3 microcarrier beads.

### Example 17

### Gene Therapy Using Endogenous Genes Corresponding to Polynucleotides of the Invention

[1043] Another method of gene therapy according to the present invention involves operably associating the endogenous polynucleotide sequence of the invention with a promoter via homologous recombination as described, for example, in U.S. Pat. No. 5,641,670, issued Jun. 24, 1997; International Publication NO: WO 96/29411, published Sep. 26, 1996; International Publication NO: WO 94/12650, published Aug. 4, 1994; Koller et al., Proc. Natl. Acad. Sci. USA, 86:8932-8935 (1989); and Zijlstra et al., Nature, 342:435-438 (1989). This method involves the activation of a gene which is present in the target cells, but which is not expressed in the cells, or is expressed at a lower level than desired.

[1044] Polynucleotide constructs are made which contain a promoter and targeting sequences, which are homologous to the 5′ non-coding sequence of endogenous polynucleotide sequence, flanking the promoter. The targeting sequence will be sufficiently near the 5′ end of the polynucleotide sequence so the promoter will be operably linked to the endogenous sequence upon homologous recombination. The promoter and the targeting sequences can be amplified using PCR. Preferably, the amplified promoter contains distinct restriction enzyme sites on the 5′ and 3′ ends. Preferably, the 3′ end of the first targeting sequence contains the same restriction enzyme site as the 5′ end of the amplified promoter and the 5′ end of the second targeting sequence contains the same restriction site as the 3′ end of the amplified promoter.

[1045] The amplified promoter and the amplified targeting sequences are digested with the appropriate restriction enzymes and subsequently treated with calf intestinal phosphatase. The digested promoter and digested targeting sequences are added together in the presence of T4 DNA ligase. The resulting mixture is maintained under conditions appropriate for ligation of the two fragments. The construct is size fractionated on an agarose gel, then purified by phenol extraction and ethanol precipitation.

[1046] In this Example, the polynucleotide constructs are administered as naked polynucleotides via electroporation. However, the polynucleotide constructs may also be administered with transfection-facilitating agents, such as liposomes, viral sequences, viral particles, precipitating agents, etc. Such methods of delivery are known in the art.

[1047] Once the cells are transfected, homologous recombination will take place which results in the promoter being operably linked to the endogenous polynucleotide sequence. This results in the expression of polynucleotide corresponding to the polynucleotide in the cell. Expression may be detected by immunological staining, or any other method known in the art.

[1048] Fibroblasts are obtained from a subject by skin biopsy. The resulting tissue is placed in DMEM+10% fetal calf serum. Exponentially growing or early stationary phase fibroblasts are trypsinized and rinsed from the plastic surface with nutrient medium. An aliquot of the cell suspension is removed for counting, and the remaining cells are subjected to centrifugation. The supernatant is aspirated and the pellet is resuspended in 5 ml of electroporation buffer (20 mM HEPES pH 7.3, 137 mM NaCl, 5 mM KCl, 0.7 mM Na₂ HPO₄, 6 mM dextrose). The cells are recentrifuged, the supernatant aspirated, and the cells resuspended in electroporation buffer containing 1 mg/ml acetylated bovine serum albumin. The final cell suspension contains approximately 3×10⁶ cells/ml. Electroporation should be performed immediately following resuspension.

[1049] Plasmid DNA is prepared according to standard techniques. For example, to construct a plasmid for targeting to the locus corresponding to the polynucleotide of the invention, plasmid pUC 18 (MBI Fermentas, Amherst, N.Y.) is digested with HindIII. The CMV promoter is amplified by PCR with an XbaI site on the 5′ end and a BamIII site on the 3′ end. Two non-coding sequences are amplified via PCR: one non-coding sequence (fragment 1) is amplified with a HindIII site at the 5′ end and an Xba site at the 3′ end; the other non-coding sequence (fragment 2) is amplified with a BamHI site at the 5′ end and a HindIII site at the 3′ end. The CMV promoter and the fragments (1 and 2) are digested with the appropriate enzymes (CMV promoter—XbaI and BamHI; fragment 1—XbaI; fragment 2 —BamHI) and ligated together. The resulting ligation product is digested with HindIII, and ligated with the HindIII-digested pUC 18 plasmid.

[1050] Plasmid DNA is added to a sterile cuvette with a 0.4 cm electrode gap (Bio-Rad). The final DNA concentration is generally at least 120 μg/ml. 0.5 ml of the cell suspension (containing approximately 1.5.×10⁶ cells) is then added to the cuvette, and the cell suspension and DNA solutions are gently mixed. Electroporation is performed with a Gene-Pulser apparatus (Bio-Rad). Capacitance and voltage are set at 960 μF and 250-300 V, respectively. As voltage increases, cell survival decreases, but the percentage of surviving cells that stably incorporate the introduced DNA into their genome increases dramatically. Given these parameters, a pulse time of approximately 14-20 mSec should be observed.

[1051] Electroporated cells are maintained at room temperature for approximately 5 min, and the contents of the cuvette are then gently removed with a sterile transfer pipette. The cells are added directly to 10 ml of prewarmed nutrient media (DMEM with 15% calf serum) in a 10 cm dish and incubated at 37 degree C. The following day, the media is aspirated and replaced with 10 ml of fresh media and incubated for a further 16-24 hours.

[1052] The engineered fibroblasts are then injected into the host, either alone or after having been grown to confluence on cytodex 3 microcarrier beads. The fibroblasts now produce the protein product. The fibroblasts can then be introduced into a patient as described above.

### Example 18

### Method of Treatment Using Gene Therapy—In Vivo

[1053] Another aspect of the present invention is using in vivo gene therapy methods to treat disorders, diseases and conditions. The gene therapy method relates to the introduction of naked nucleic acid (DNA, RNA, and antisense DNA or RNA) sequences into an animal to increase or decrease the expression of the polypeptide. The polynucleotide of the present invention may be operatively linked to (i.e., associated with) a promoter or any other genetic elements necessary for the expression of the polypeptide by the target tissue. Such gene therapy and delivery techniques and methods are known in the art, see, for example, WO90/11092, WO98/11779; U.S. Pat. No. 5,693,622, 5,705,151, 5,580,859; Tabata et al., Cardiovasc. Res. 35(3):470-479 (1997); Chao et al., Pharmacol. Res. 35(6):517-522 (1997); Wolff, Neuromuscul. Disord. 7(5):314-318 (1997); Schwartz et al., Gene Ther. 3(5):405-411 (1996); Tsurumi et al., Circulation 94(12):3281-3290 (1996) (incorporated herein by reference).

[1054] The polynucleotide constructs may be delivered by any method that delivers injectable materials to the cells of an animal, such as, injection into the interstitial space of tissues (heart, muscle, skin, lung, liver, intestine and the like). The polynucleotide constructs can be delivered in a pharmaceutically acceptable liquid or aqueous carrier.

[1055] The term “naked” polynucleotide, DNA or RNA, refers to sequences that are free from any delivery vehicle that acts to assist, promote, or facilitate entry into the cell, including viral sequences, viral particles, liposome formulations, lipofectin or precipitating agents and the like. However, the polynucleotides of the present invention may also be delivered in liposome formulations (such as those taught in Felgner P. L. et al. (1995) Ann. NY Acad. Sci. 772:126-139 and Abdallah B. et al. (1995) Biol. Cell 85(l):1-7) which can be prepared by methods well known to those skilled in the art.

[1056] The polynucleotide vector constructs used in the gene therapy method are preferably constructs that will not integrate into the host genome nor will they contain sequences that allow for replication. Any strong promoter known to those skilled in the art can be used for driving the expression of DNA. Unlike other gene therapy techniques, one major advantage of introducing naked nucleic acid sequences into target cells is the transitory nature of the polynucleotide synthesis in the cells. Studies have shown that non-replicating DNA sequences can be introduced into cells to provide production of the desired polypeptide for periods of up to six months.

[1057] The polynucleotide construct can be delivered to the interstitial space of tissues within an animal, including muscle, skin, brain, lung, liver, spleen, bone marrow, thymus, heart, lymph, blood, bone, cartilage, pancreas, kidney, gall bladder, stomach, intestine, testis, ovary, uterus, rectum, nervous system, eye, gland, and connective tissue. Interstitial space of the tissues comprises the intercellular fluid, mucopolysaccharide matrix among the reticular fibers of organ tissues, elastic fibers in the walls of vessels or chambers, collagen fibers of fibrous tissues, or that same matrix within connective tissue ensheathing muscle cells or in the lacunae of bone. It is similarly the space occupied by the plasma of the circulation and the lymph fluid of the lymphatic channels. Delivery to the interstitial space of muscle tissue is preferred for the reasons discussed below. They may be conveniently delivered by injection into the tissues comprising these cells. They are preferably delivered to and expressed in persistent, non-dividing cells which are differentiated, although delivery and expression may be achieved in non-differentiated or less completely differentiated cells, such as, for example, stem cells of blood or skin fibroblasts. In vivo muscle cells are particularly competent in their ability to take up and express polynucleotides.

[1058] For the naked polynucleotide injection, an effective dosage amount of DNA or RNA will be in the range of from about 0.05 g/kg body weight to about 50 mg/kg body weight. Preferably the dosage will be from about 0.005 mg/kg to about 20 mg/kg and more preferably from about 0.05 mg/kg to about 5 mg/kg. Of course, as the artisan of ordinary skill will appreciate, this dosage will vary according to the tissue site of injection. The appropriate and effective dosage of nucleic acid sequence can readily be determined by those of ordinary skill in the art and may depend on the condition being treated and the route of administration. The preferred route of administration is by the parenteral route of injection into the interstitial space of tissues. However, other parenteral routes may also be used, such as, inhalation of an aerosol formulation particularly for delivery to lungs or bronchial tissues, throat or mucous membranes of the nose. In addition, naked polynucleotide constructs can be delivered to arteries during angioplasty by the catheter used in the procedure.

[1059] The dose response effects of injected polynucleotide in muscle in vivo is determined as follows. Suitable template DNA for production of mRNA coding for polypeptide of the present invention is prepared in accordance with a standard recombinant DNA methodology. The template DNA, which may be either circular or linear, is either used as naked DNA or complexed with liposomes. The quadriceps muscles of mice are then injected with various amounts of the template DNA.

[1060] Five to six week old female and male Balb/C mice are anesthetized by intraperitoneal injection with 0.3 ml of 2.5% Avertin. A 1.5 cm incision is made on the anterior thigh, and the quadriceps muscle is directly visualized. The template DNA is injected in 0.1 ml of carrier in a 1 cc syringe through a 27 gauge needle over one minute, approximately 0.5 cm from the distal insertion site of the muscle into the knee and about 0.2 cm deep. A suture is placed over the injection site for future localization, and the skin is closed with stainless steel clips.

[1061] After an appropriate incubation time (e.g., 7 days) muscle extracts are prepared by excising the entire quadriceps. Every fifth 15 um cross-section of the individual quadriceps muscles is histochemically stained for protein expression. A time course for protein expression may be done in a similar fashion except that quadriceps from different mice are harvested at different times. Persistence of DNA in muscle following injection may be determined by Southern blot analysis after preparing total cellular DNA and HIRT supernatants from injected and control mice. The results of the above experimentation in mice can be used to extrapolate proper dosages and other treatment parameters in humans and other animals using naked DNA.

### Example 19

### Transgenic Animals

[1062] The polypeptides of the invention can also be expressed in transgenic animals. Animals of any species, including, but not limited to, mice, rats, rabbits, hamsters, guinea pigs, pigs, micro-pigs, goats, sheep, cows and non-human primates, e.g., baboons, monkeys, and chimpanzees may be used to generate transgenic animals. In a specific embodiment, techniques described herein or otherwise known in the art, are used to express polypeptides of the invention in humans, as part of a gene therapy protocol.

[1063] Any technique known in the art may be used to introduce the transgene (i.e., polynucleotides of the invention) into animals to produce the founder lines of transgenic animals. Such techniques include, but are not limited to, pronuclear microinjection (Paterson et al., Appl. Microbiol. Biotechnol. 40:691-698 (1994); Carver et al., Biotechnology (NY) 11:1263-1270 (1993); Wright et al., Biotechnology (NY) 9:830-834 (1991); and Hoppe et al., U.S. Pat. No. 4,873,191 (1989)); retrovirus mediated gene transfer into germ lines (Van der Putten et al., Proc. Natl. Acad. Sci., USA 82:6148-6152 (1985)), blastocysts or embryos; gene targeting in embryonic stem cells (Thompson et al., Cell 56:313-321 (1989)); electroporation of cells or embryos (Lo, 1983, Mol Cell. Biol. 3:1803-1814 (1983)); introduction of the polynucleotides of the invention using a gene gun (see, e.g., Ulmer et al., Science 259:1745 (1993); introducing nucleic acid constructs into embryonic pleuripotent stem cells and transferring the stem cells back into the blastocyst; and sperm-mediated gene transfer (Lavitrano et al., Cell 57:717-723 (1989); etc. For a review of such techniques, see Gordon, “Transgenic Animals,” Intl. Rev. Cytol. 115:171-229 (1989), which is incorporated by reference herein in its entirety.

[1064] Any technique known in the art may be used to produce transgenic clones containing polynucleotides of the invention, for example, nuclear transfer into enucleated oocytes of nuclei from cultured embryonic, fetal, or adult cells induced to quiescence (Campell et al., Nature 380:64-66 (1996); Wilmut et al., Nature 385:810-813 (1997)).

[1065] The present invention provides for transgenic animals that carry the transgene in all their cells, as well as animals which carry the transgene in some, but not all their cells, i.e., mosaic animals or chimeric. The transgene may be integrated as a single transgene or as multiple copies such as in concatamers, e.g., head-to-head tandems or head-to-tail tandems. The transgene may also be selectively introduced into and activated in a particular cell type by following, for example, the teaching of Lasko et al. (Lasko et al., Proc. Natl. Acad. Sci. USA 89:6232-6236 (1992)). The regulatory sequences required for such a cell-type specific activation will depend upon the particular cell type of interest, and will be apparent to those of skill in the art. When it is desired that the polynucleotide transgene be integrated into the chromosomal site of the endogenous gene, gene targeting is preferred. Briefly, when such a technique is to be utilized, vectors containing some nucleotide sequences homologous to the endogenous gene are designed for the purpose of integrating, via homologous recombination with chromosomal sequences, into and disrupting the function of the nucleotide sequence of the endogenous gene. The transgene may also be selectively introduced into a particular cell type, thus inactivating the endogenous gene in only that cell type, by following, for example, the teaching of Gu et al. (Gu et al., Science 265:103-106 (1994)). The regulatory sequences required for such a cell-type specific inactivation will depend upon the particular cell type of interest, and will be apparent to those of skill in the art.

[1066] Once transgenic animals have been generated, the expression of the recombinant gene may be assayed utilizing standard techniques. Initial screening may be accomplished by Southern blot analysis or PCR techniques to analyze animal tissues to verify that integration of the transgene has taken place. The level of mRNA expression of the transgene in the tissues of the transgenic animals may also be assessed using techniques which include, but are not limited to, Northern blot analysis of tissue samples obtained from the animal, in situ hybridization analysis, and reverse transcriptase-PCR (rt-PCR). Samples of transgenic gene-expressing tissue may also be evaluated immunocytochemically or immunohistochemically using antibodies specific for the transgene product.

[1067] Once the founder animals are produced, they may be bred, inbred, outbred, or crossbred to produce colonies of the particular animal. Examples of such breeding strategies include, but are not limited to: outbreeding of founder animals with more than one integration site in order to establish separate lines; inbreeding of separate lines in order to produce compound transgenics that express the transgene at higher levels because of the effects of additive expression of each transgene; crossing of heterozygous transgenic animals to produce animals homozygous for a given integration site in order to both augment expression and eliminate the need for screening of animals by DNA analysis; crossing of separate homozygous lines to produce compound heterozygous or homozygous lines; and breeding to place the transgene on a distinct background that is appropriate for an experimental model of interest.

[1068] Transgenic animals of the invention have uses which include, but are not limited to, animal model systems useful in elaborating the biological function of polypeptides of the present invention, studying conditions and/or disorders associated with aberrant expression, and in screening for compounds effective in ameliorating such conditions and/or disorders.

### Example 20

### Knock-out Animals

[1069] Endogenous gene expression can also be reduced by inactivating or “knocking out” the gene and/or its promoter using targeted homologous recombination. (e.g., see Smithies et al., Nature 317:230-234 (1985); Thomas & Capecchi, Cell 51:503-512 (1987); Thompson et al., Cell 5:313-321 (1989); each of which is incorporated by reference herein in its entirety). For example, a mutant, non-functional polynucleotide of the invention (or a completely unrelated DNA sequence) flanked by DNA homologous to the endogenous polynucleotide sequence (either the coding regions or regulatory regions of the gene) can be used, with or without a selectable marker and/or a negative selectable marker, to transfect cells that express polypeptides of the invention in vivo. In another embodiment, techniques known in the art are used to generate knockouts in cells that contain, but do not express the gene of interest. Insertion of the DNA construct, via targeted homologous recombination, results in inactivation of the targeted gene. Such approaches are particularly suited in research and agricultural fields where modifications to embryonic stem cells can be used to generate animal offspring with an inactive targeted gene (e.g., see Thomas & Capecchi 1987 and Thompson 1989, supra). However this approach can be routinely adapted for use in humans provided the recombinant DNA constructs are directly administered or targeted to the required site in vivo using appropriate viral vectors that will be apparent to those of skill in the art.

[1070] In further embodiments of the invention, cells that are genetically engineered to express the polypeptides of the invention, or alternatively, that are genetically engineered not to express the polypeptides of the invention (e.g., knockouts) are administered to a patient in vivo. Such cells may be obtained from the patient (i.e., animal, including human) or an MHC compatible donor and can include, but are not limited to fibroblasts, bone marrow cells, blood cells (e.g., lymphocytes), adipocytes, muscle cells, endothelial cells etc. The cells are genetically engineered in vitro using recombinant DNA techniques to introduce the coding sequence of polypeptides of the invention into the cells, or alternatively, to disrupt the coding sequence and/or endogenous regulatory sequence associated with the polypeptides of the invention, e.g., by transduction (using viral vectors, and preferably vectors that integrate the transgene into the cell genome) or transfection procedures, including, but not limited to, the use of plasmids, cosmids, YACs, naked DNA, electroporation, liposomes, etc. The coding sequence of the polypeptides of the invention can be placed under the control of a strong constitutive or inducible promoter or promoter/enhancer to achieve expression, and preferably secretion, of the polypeptides of the invention. The engineered cells which express and preferably secrete the polypeptides of the invention can be introduced into the patient systemically, e.g., in the circulation, or intraperitoneally.

[1071] Alternatively, the cells can be incorporated into a matrix and implanted in the body, e.g., genetically engineered fibroblasts can be implanted as part of a skin graft; genetically engineered endothelial cells can be implanted as part of a lymphatic or vascular graft. (See, for example, Anderson et al. U.S. Pat. No. 5,399,349; and Mulligan & Wilson, U.S. Pat. No. 5,460,959 each of which is incorporated by reference herein in its entirety).

[1072] When the cells to be administered are non-autologous or non-MHC compatible cells, they can be administered using well known techniques which prevent the development of a host immune response against the introduced cells. For example, the cells may be introduced in an encapsulated form which, while allowing for an exchange of components with the immediate extracellular environment, does not allow the introduced cells to be recognized by the host immune system.

[1073] Transgenic and “knock-out” animals of the invention have uses which include, but are not limited to, animal model systems useful in elaborating the biological function of polypeptides of the present invention, studying conditions and/or disorders associated with aberrant expression, and in screening for compounds effective in ameliorating such conditions and/or disorders.

### Example 21

### Assays Detecting Stimulation or Inhibition of B cell Proliferation and Differentiation

[1074] Generation of functional humoral immune responses requires both soluble and cognate signaling between B-lineage cells and their microenvironment. Signals may impart a positive stimulus that allows a B-lineage cell to continue its programmed development, or a negative stimulus that instricts the cell to arrest its current developmental pathway. To date, numerous stimulatory and inhibitory signals have been found to influence B cell responsiveness including IL-2, IL-4, IL-5, IL-6, IL-7, IL-10, IL-13, IL-14 and IL-15. Interestingly, these signals are by themselves weak effectors but can, in combination with various co-stimulatory proteins, induce activation, proliferation, differentiation, homing, tolerance and death among B cell populations.

[1075] One of the best studied classes of B-cell co-stimulatory proteins is the TNF-superfamily. Within this family CD40, CD27, and CD30 along with their respective ligands CD154, CD70, and CD153 have been found to regulate a variety of immune responses. Assays which allow for the detection and/or observation of the proliferation and differentiation of these B-cell populations and their precursors are valuable tools in determining the effects various proteins may have on these B-cell populations in terms of proliferation and differentiation. Listed below are two assays designed to allow for the detection of the differentiation, proliferation, or inhibition of B-cell populations and their precursors.

[1076] In Vitro Assay- Agonists or antagonists of the invention can be assessed for its ability to induce activation, proliferation, differentiation or inhibition and/or death in B-cell populations and their precursors. The activity of the agonists or antagonists of the invention on purified human tonsillar B cells, measured qualitatively over the dose range from 0.1 to 10,000 ng/mL, is assessed in a standard B-lymphocyte co-stimulation assay in which purified tonsillar B cells are cultured in the presence of either formalin-fixed Staphylococcus aureus Cowan I (SAC) or immobilized anti-human IgM antibody as the priming agent. Second signals such as IL-2 and IL-15 synergize with SAC and IgM crosslinking to elicit B cell proliferation as measured by tritiated-thymidine incorporation. Novel synergizing agents can be readily identified using this assay. The assay involves isolating human tonsillar B cells by magnetic bead (MACS) depletion of CD3-positive cells. The resulting cell population is greater than 95% B cells as assessed by expression of CD45R(B220).

[1077] Various dilutions of each sample are placed into individual wells of a 96-well plate to which are added 10⁵ B-cells suspended in culture medium (RPMI 1640 containing 10% FBS, 5×10⁻⁵M 2ME, 100 U/ml penicillin, 10 ug/ml streptomycin, and 10⁻⁵ dilution of SAC) in a total volume of 150 ul. Proliferation or inhibition is quantitated by a 20 h pulse (1 uCi/well) with 3H-thymidine (6.7 Ci/mM) beginning 72 h post factor addition. The positive and negative controls are IL2 and medium respectively.

[1078] In vivo Assay-BALB/c mice are injected (i.p.) twice per day with buffer only, or 2 mg/Kg of agonists or antagonists of the invention, or truncated forms thereof. Mice receive this treatment for 4 consecutive days, at which time they are sacrificed and various tissues and serum collected for analyses. Comparison of H&E sections from normal spleens and spleens treated with agonists or antagonists of the invention identify the results of the activity of the agonists or antagonists on spleen cells, such as the diffusion of peri-arterial lymphatic sheaths, and/or significant increases in the nucleated cellularity of the red pulp regions, which may indicate the activation of the differentiation and proliferation of B-cell populations. Immunohistochemical studies using a B cell marker, anti-CD45R(B220), are used to determine whether any physiological changes to splenic cells, such as splenic disorganization, are due to increased B-cell representation within loosely defined B-cell zones that infiltrate established T-cell regions.

[1079] Flow cytometric analyses of the spleens from mice treated with agonist or antagonist is used to indicate whether the agonists or antagonists specifically increases the proportion of ThB+, CD45R(B220)dull B cells over that which is observed in control mice.

[1080] Likewise, a predicted consequence of increased mature B-cell representation in vivo is a relative increase in serum Ig titers. Accordingly, serum IgM and IgA levels are compared between buffer and agonists or antagonists-treated mice.

[1081] The studies described in this example tested activity of agonists or antagonists of the invention. However, one skilled in the art could easily modify the exemplified studies to test the activity of polynucleotides or polypeptides of the invention (e.g., gene therapy).

### Example 22

### T Cell Proliferation Assay

[1082] A CD3-induced proliferation assay is performed on PBMCs and is measured by the uptake of ³H-thymidine. The assay is performed as follows. Ninety-six well plates are coated with 100 μl/well of mAb to CD3 (HIT3a, Pharmingen) or isotype-matched control mAb (B33.1) overnight at 4 degrees C (1 μg/ml in 0.05M bicarbonate buffer, pH 9.5), then washed three times with PBS. PBMC are isolated by F/H gradient centrifugation from human peripheral blood and added to quadruplicate wells (5×10⁴/well) of mAb coated plates in RPMI containing 10% FCS and P/S in the presence of varying concentrations of agonists or antagonists of the invention (total volume 200 ul). Relevant protein buffer and medium alone are controls. After 48 hr. culture at 37 degrees C, plates are spun for 2 min. at 1000 rpm and 100 μl of supernatant is removed and stored -20 degrees C for measurement of IL-2 (or other cytokines) if effect on proliferation is observed. Wells are supplemented with 100 ul of medium containing 0.5 uCi of ³H-thymidine and cultured at 37 degrees C for 18-24 hr. Wells are harvested and incorporation of ³H-thymidine used as a measure of proliferation. Anti-CD3 alone is the positive control for proliferation. IL-2 (100 U/ml) is also used as a control which enhances proliferation. Control antibody which does not induce proliferation of T cells is used as the negative control for the effects of agonists or antagonists of the invention.

[1083] The studies described in this example tested activity of agonists or antagonists of the invention. However, one skilled in the art could easily modify the exemplified studies to test the activity of polynucleotides or polypeptides of the invention (e.g., gene therapy).

### Example 23

### Effect of Agonists or Antagonists of the Invention on the Expression of MHC Class II, Costimulatory and Adhesion Molecules and Cell Differentiation of Monocytes and Monocyte-derived Human Dendritic Cells

[1084] Dendritic cells are generated by the expansion of proliferating precursors found in the peripheral blood: adherent PBMC or elutriated monocytic fractions are cultured for 7-10 days with GM-CSF (50 ng/ml) and IL-4 (20 ng/ml). These dendritic cells have the characteristic phenotype of immature cells (expression of CD1, CD80, CD86, CD40 and MHC class II antigens). Treatment with activating factors, such as TNF-α, causes a rapid change in surface phenotype (increased expression of MHC class I and II, costimulatory and adhesion molecules, downregulation of FCγRII, upregulation of CD83). These changes correlate with increased antigen-presenting capacity and with functional maturation of the dendritic cells.

[1085] FACS analysis of surface antigens is performed as follows. Cells are treated 1-3 days with increasing concentrations of agonist or antagonist of the invention or LPS (positive control), washed with PBS containing 1% BSA and 0.02 mM sodium azide, and then incubated with 1:20 dilution of appropriate FITC- or PE-labeled monoclonal antibodies for 30 minutes at 4 degrees C. After an additional wash, the labeled cells are analyzed by flow cytometry on a FACScan (Becton Dickinson).

[1086] Effect on the Production of Cytokines.

[1087] Cytokines generated by dendritic cells, in particular IL-12, are important in the initiation of T-cell dependent immune responses. IL-12 strongly influences the development of Th1 helper T-cell immune response, and induces cytotoxic T and NK cell function. An ELISA is used to measure the IL-12 release as follows. Dendritic cells (10⁶/ml) are treated with increasing concentrations of agonists or antagonists of the invention for 24 hours. LPS (100 ng/ml) is added to the cell culture as positive control. Supernatants from the cell cultures are then collected and analyzed for IL-12 content using commercial ELISA kit (e.g., R & D Systems (Minneapolis, MN)). The standard protocols provided with the kits are used.

[1088] Effect on the Expression of MHC Class II. Costimulatory and Adhesion Molecules.

[1089] Three major families of cell surface antigens can be identified on monocytes: adhesion molecules, molecules involved in antigen presentation, and Fc receptor. Modulation of the expression of MHC class II antigens and other costimulatory molecules, such as B7 and ICAM-1, may result in changes in the antigen presenting capacity of monocytes and ability to induce T cell activation. Increased expression of Fc receptors may correlate with improved monocyte cytotoxic activity, cytokine release and phagocytosis.

[1090] FACS analysis is used to examine the surface antigens as follows. Monocytes are treated 1-5 days with increasing concentrations of agonists or antagonists of the invention or LPS (positive control), washed with PBS containing 1% BSA and 0.02 mM sodium azide, and then incubated with 1:20 dilution of appropriate FITC- or PE-labeled monoclonal antibodies for 30 minutes at 4 degrees C. After an additional wash, the labeled cells are analyzed by flow cytometry on a FACScan (Becton Dickinson).

[1091] Monocyte Activation and/or Increased Survival.

[1092] Assays for molecules that activate (or alternatively, inactivate) monocytes and/or increase monocyte survival (or alternatively, decrease monocyte survival) are known in the art and may routinely be applied to determine whether a molecule of the invention functions as an inhibitor or activator of monocytes. Agonists or antagonists of the invention can be screened using the three assays described below. For each of these assays, Peripheral blood mononuclear cells (PBMC) are purified from single donor leukopacks (American Red Cross, Baltimore, MD) by centrifugation through a Histopaque gradient (Sigma). Monocytes are isolated from PBMC by counterflow centrifugal elutriation.

[1093] Monocyte Survival Assay.

[1094] Human peripheral blood monocytes progressively lose viability when cultured in absence of serum or other stimuli. Their death results from internally regulated processes (apoptosis). Addition to the culture of activating factors, such as TNF-alpha dramatically improves cell survival and prevents DNA fragmentation. Propidium iodide (PI) staining is used to measure apoptosis as follows. Monocytes are cultured for 48 hours in polypropylene tubes in serum-free medium (positive control), in the presence of 100 ng/ml TNF-alpha (negative control), and in the presence of varying concentrations of the compound to be tested. Cells are suspended at a concentration of 2×10⁶/ml in PBS containing PI at a final concentration of 5 μg/ml, and then incubated at room temperature for 5 minutes before FACScan analysis. PI uptake has been demonstrated to correlate with DNA fragmentation in this experimental paradigm.

[1095] Effect on Cytokine Release.

[1096] An important function of monocytes/macrophages is their regulatory activity on other cellular populations of the immune system through the release of cytokines after stimulation. An ELISA to measure cytokine release is performed as follows. Human monocytes are incubated at a density of 5×10⁵ cells/ml with increasing concentrations of agonists or antagonists of the invention and under the same conditions, but in the absence of agonists or antagonists. For IL-12 production, the cells are primed overnight with IFN (100 U/ml) in the presence of agonist or antagonist of the invention. LPS (10 ng/ml) is then added. Conditioned media are collected after 24 h and kept frozen until use. Measurement of TNF-alpha, IL-10, MCP-1 and IL-8 is then performed using a commercially available ELISA kit (e.g., R & D Systems (Minneapolis, Minn.)) and applying the standard protocols provided with the kit.

[1097] Oxidative Burst.

[1098] Purified monocytes are plated in 96-w plate at 2-1×10⁵ cell/well. Increasing concentrations of agonists or antagonists of the invention are added to the wells in a total volume of 0.2 ml culture medium (RPMI 1640+10% FCS, glutamine and antibiotics). After 3 days incubation, the plates are centrifuged and the medium is removed from the wells. To the macrophage monolayers, 0.2 ml per well of phenol red solution (140 mM NaCl, 10 mM potassium phosphate buffer pH 7.0, 5.5 mM dextrose, 0.56 mM phenol red and 19 U/ml of HRPO) is added, together with the stimulant (200 nM PMA). The plates are incubated at 37° C. for 2 hours and the reaction is stopped by adding 20 μl 1N NaOH per well. The absorbance is read at 610 nm. To calculate the amount of H₂O₂ produced by the macrophages, a standard curve of a H₂O₂ solution of known molarity is performed for each experiment.

[1099] The studies described in this example tested activity of agonists or antagonists of the invention. However, one skilled in the art could easily modify the exemplified studies to test the activity of polynucleotides or polypeptides of the invention (e.g., gene therapy).

### Example 24

### Biological Effects of Agonists or Antagonists of the Invention

[1100] Astrocyte and Neuronal Assays

[1101] Agonists or antagonists of the invention, expressed in Escherichia coli and purified as described above, can be tested for activity in promoting the survival, neurite outgrowth, or phenotypic differentiation of cortical neuronal cells and for inducing the proliferation of glial fibrillary acidic protein immunopositive cells, astrocytes. The selection of cortical cells for the bioassay is based on the prevalent expression of FGF-1 and FGF-2 in cortical structures and on the previously reported enhancement of cortical neuronal survival resulting from FGF-2 treatment. A thymidine incorporation assay, for example, can be used to elucidate an agonist or antagonist of the invention's activity on these cells.

[1102] Moreover, previous reports describing the biological effects of FGF-2 (basic FGF) on cortical or hippocampal neurons in vitro have demonstrated increases in both neuron survival and neurite outgrowth (Walicke et al., “Fibroblast growth factor promotes survival of dissociated hippocampal neurons and enhances neurite extension.” Proc. Natl. Acad. Sci. USA 83:3012-3016. (1986), assay herein incorporated by reference in its entirety). However, reports from experiments done on PC-12 cells suggest that these two responses are not necessarily synonymous and may depend on not only which FGF is being tested but also on which receptor(s) are expressed on the target cells. Using the primary cortical neuronal culture paradigm, the ability of an agonist or antagonist of the invention to induce neurite outgrowth can be compared to the response achieved with FGF-2 using, for example, a thymidine incorporation assay.

[1103] Fibroblast and Endothelial Cell Assays

[1104] Human lung fibroblasts are obtained from Clonetics (San Diego, Calif.) and maintained in growth media from Clonetics. Dermal microvascular endothelial cells are obtained from Cell Applications (San Diego, Calif.). For proliferation assays, the human lung fibroblasts and dermal microvascular endothelial cells can be cultured at 5,000 cells/well in a 96-well plate for one day in growth medium. The cells are then incubated for one day in 0.1% BSA basal medium. After replacing the medium with fresh 0.1% BSA medium, the cells are incubated with the test proteins for 3 days. Alamar Blue (Alamar Biosciences, Sacramento, Calif.) is added to each well to a final concentration of 10%. The cells are incubated for 4 hr. Cell viability is measured by reading in a CytoFluor fluorescence reader. For the PGE₂ assays, the human lung fibroblasts are cultured at 5,000 cells/well in a 96-well plate for one day. After a medium change to 0.1% BSA basal medium, the cells are incubated with FGF-2 or agonists or antagonists of the invention with or without IL-1α for 24 hours. The supernatants are collected and assayed for PGE₂ by EIA kit (Cayman, Ann Arbor, Mich.). For the IL-6 assays, the human lung fibroblasts are cultured at 5,000 cells/well in a 96-well plate for one day. After a medium change to 0.1% BSA basal medium, the cells are incubated with FGF-2 or with or without agonists or antagonists of the invention IL-1 a for 24 hours. The supernatants are collected and assayed for IL-6 by ELISA kit (Endogen, Cambridge, Mass.).

[1105] Human lung fibroblasts are cultured with FGF-2 or agonists or antagonists of the invention for 3 days in basal medium before the addition of Alamar Blue to assess effects on growth of the fibroblasts. FGF-2 should show a stimulation at 10-2500 ng/ml which can be used to compare stimulation with agonists or antagonists of the invention.

[1106] Parkinson Models.

[1107] The loss of motor function in Parkinson's disease is attributed to a deficiency of striatal dopamine resulting from the degeneration of the nigrostriatal dopaminergic projection neurons. An animal model for Parkinson's that has been extensively characterized involves the systemic administration of 1-methyl-4 phenyl 1,2,3,6-tetrahydropyridine (MPTP). In the CNS, MPTP is taken-up by astrocytes and catabolized by monoamine oxidase B to 1-methyl-4-phenyl pyridine (MPP⁺) and released. Subsequently, MPP⁺ is actively accumulated in dopaminergic neurons by the high-affinity reuptake transporter for dopamine. MPP+is then concentrated in mitochondria by the electrochemical gradient and selectively inhibits nicotidamide adenine disphosphate: ubiquinone oxidoreductionase (complex I), thereby interfering with electron transport and eventually generating oxygen radicals.

[1108] It has been demonstrated in tissue culture paradigms that FGF-2 (basic FGF) has trophic activity towards nigral dopaminergic neurons (Ferrari et al., Dev. Biol. 1989). Recently, Dr. Unsicker's group has demonstrated that administering FGF-2 in gel foam implants in the striatum results in the near complete protection of nigral dopaminergic neurons from the toxicity associated with MPTP exposure (Otto and Unsicker, J. Neuroscience, 1990).

[1109] Based on the data with FGF-2, agonists or antagonists of the invention can be evaluated to determine whether it has an action similar to that of FGF-2 in enhancing dopaminergic neuronal survival in vitro and it can also be tested in vivo for protection of dopaminergic neurons in the striatum from the damage associated with MPTP treatment. The potential effect of an agonist or antagonist of the invention is first examined in vitro in a dopaminergic neuronal cell culture paradigm. The cultures are prepared by dissecting the midbrain floor plate from gestation day 14 Wistar rat embryos. The tissue is dissociated with trypsin and seeded at a density of 200,000 cells/cm² on polyorthinine-laminin coated glass coverslips. The cells are maintained in Dulbecco's Modified Eagle's medium and F12 medium containing hormonal supplements (N1). The cultures are fixed with paraformaldehyde after 8 days in vitro and are processed for tyrosine hydroxylase, a specific marker for dopaminergic neurons, immunohistochemical staining. Dissociated cell cultures are prepared from embryonic rats. The culture medium is changed every third day and the factors are also added at that time.

[1110] Since the dopaminergic neurons are isolated from animals at gestation day 14, a developmental time which is past the stage when the dopaminergic precursor cells are proliferating, an increase in the number of tyrosine hydroxylase immunopositive neurons would represent an increase in the number of dopaminergic neurons surviving in vitro. Therefore, if an agonist or antagonist of the invention acts to prolong the survival of dopaminergic neurons, it would suggest that the agonist or antagonist may be involved in Parkinson's Disease.

[1111] The studies described in this example tested activity of agonists or antagonists of the invention. However, one skilled in the art could easily modify the exemplified studies to test the activity of polynucleotides or polypeptides of the invention (e.g., gene therapy).

### Example 25

### The Effect of Agonists or Antagonists of the Invention on the Growth of Vascular Endothelial Cells

[1112] On day 1, human umbilical vein endothelial cells (HUVEC) are seeded at 2-5×10⁴ cells/35 mm dish density in M199 medium containing 4% fetal bovine serum (FBS), 16 units/ml heparin, and 50 units/ml endothelial cell growth supplements (ECGS, Biotechnique, Inc.). On day 2, the medium is replaced with M199 containing 10% FBS, 8 units/ml heparin. An agonist or antagonist of the invention, and positive controls, such as VEGF and basic FGF (bFGF) are added, at varying concentrations. On days 4 and 6, the medium is replaced. On day 8, cell number is determined with a Coulter Counter.

[1113] An increase in the number of HUVEC cells indicates that the compound of the invention may proliferate vascular endothelial cells, while a decrease in the number of HUVEC cells indicates that the compound of the invention inhibits vascular endothelial cells.

[1114] The studies described in this example tested activity of a polypeptide of the invention. However, one skilled in the art could easily modify the exemplified studies to test the activity of polynucleotides (e.g., gene therapy), agonists, and/or antagonists of the invention.

### Example 26

### Rat Corneal Wound Healing Model

[1115] This animal model shows the effect of an agonist or antagonist of the invention on neovascularization. The experimental protocol includes:

[1116] a) Making a 1-1.5 mm long incision from the center of cornea into the stromal layer.

[1117] b) Inserting a spatula below the lip of the incision facing the outer corner of the eye.

[1118] c) Making a pocket (its base is 1-1.5 mm form the edge of the eye).

[1119] d) Positioning a pellet, containing 50 ng-5 ug of an agonist or antagonist of the invention, within the pocket.

[1120] e) Treatment with an agonist or antagonist of the invention can also be applied topically to the corneal wounds in a dosage range of 20 mg -500 mg (daily treatment for five days).

[1121] The studies described in this example tested activity of agonists or antagonists of the invention. However, one skilled in the art could easily modify the exemplified studies to test the activity of polynucleotides or polypeptides of the invention (e.g., gene therapy).

### Example 27

### Diabetic Mouse and Glucocorticoid-impaired Wound Healing Models

[1122] Diabetic db+/db+ Mouse Model.

[1123] To demonstrate that an agonist or antagonist of the invention accelerates the healing process, the genetically diabetic mouse model of wound healing is used. The full thickness wound healing model in the db+/db+mouse is a well characterized, clinically relevant and reproducible model of impaired wound healing. Healing of the diabetic wound is dependent on formation of granulation tissue and re-epithelialization rather than contraction (Gartner, M. H. et al., J. Surg. Res. 52:389 (1992); Greenhalgh, D. G. et al., Am. J Pathol. 136:1235 (1990)).

[1124] The diabetic animals have many of the characteristic features observed in Type II diabetes mellitus. Homozygous (db+/db+) mice are obese in comparison to their normal heterozygous (db+/+m) littermates. Mutant diabetic (db+/db+) mice have a single autosomal recessive mutation on chromosome 4 (db+) (Coleman et al. Proc. Natl. Acad. Sci. USA 77:283-293 (1982)). Animals show polyphagia, polydipsia and polyuria. Mutant diabetic mice (db+/db+) have elevated blood glucose, increased or normal insulin levels, and suppressed cell-mediated immunity (Mandel et al., J. Immunol. 120:1375 (1978); Debray-Sachs, M. et al., Clin. Exp. Immunol. 51(1):1-7 (1983); Leiter et al., Am. J. of Pathol. 114:46-55 (1985)). Peripheral neuropathy, myocardial complications, and microvascular lesions, basement membrane thickening and glomerular filtration abnormalities have been described in these animals (Norido, F. et al., Exp. Neurol. 83(2):221-232 (1984); Robertson et al., Diabetes 29(1):60-67 (1980); Giacomelli et al., Lab Invest. 40(4):460-473 (1979); Coleman, D. L., Diabetes 31 (Suppl):1-6 (1982)). These homozygous diabetic mice develop hyperglycemia that is resistant to insulin analogous to human type II diabetes (Mandel et al., J. Immunol. 120:1375-1377 (1978)).

[1125] The characteristics observed in these animals suggests that healing in this model may be similar to the healing observed in human diabetes (Greenhalgh, et al., Am. J. of Pathol. 136:1235-1246 (1990)).

[1126] Genetically diabetic female C57BL/KsJ (db+/db+) mice and their non-diabetic (db+/+m) heterozygous littermates are used in this study (Jackson Laboratories). The animals are purchased at 6 weeks of age and are 8 weeks old at the beginning of the study. Animals are individually housed and received food and water ad libitum. All manipulations are performed using aseptic techniques. The experiments are conducted according to the rules and guidelines of Human Genome Sciences, Inc. Institutional Animal Care and Use Committee and the Guidelines for the Care and Use of Laboratory Animals.

[1127] Wounding protocol is performed according to previously reported methods (Tsuboi, R. and Rifkin, D. B., J. Exp. Med. 172:245-251 (1990)). Briefly, on the day of wounding, animals are anesthetized with an intraperitoneal injection of Avertin (0.01 mg/mL), 2,2,2-tribromoethanol and 2-methyl-2-butanol dissolved in deionized water. The dorsal region of the animal is shaved and the skin washed with 70% ethanol solution and iodine. The surgical area is dried with sterile gauze prior to wounding. An 8 mm full-thickness wound is then created using a Keyes tissue punch. Immediately following wounding, the surrounding skin is gently stretched to eliminate wound expansion. The wounds are left open for the duration of the experiment. Application of the treatment is given topically for 5 consecutive days commencing on the day of wounding. Prior to treatment, wounds are gently cleansed with sterile saline and gauze sponges.

[1128] Wounds are visually examined and photographed at a fixed distance at the day of surgery and at two day intervals thereafter. Wound closure is determined by daily measurement on days 1-5 and on day 8. Wounds are measured horizontally and vertically using a calibrated Jameson caliper. Wounds are considered healed if granulation tissue is no longer visible and the wound is covered by a continuous epithelium.

[1129] An agonist or antagonist of the invention is administered using at a range different doses, from 4 mg to 500 mg per wound per day for 8 days in vehicle. Vehicle control groups received 50 mL of vehicle solution.

[1130] Animals are euthanized on day 8 with an intraperitoneal injection of sodium pentobarbital (300 mg/kg). The wounds and surrounding skin are then harvested for histology and immunohistochemistry. Tissue specimens are placed in 10% neutral buffered formalin in tissue cassettes between biopsy sponges for further processing.

[1131] Three groups of 10 animals each (5 diabetic and 5 non-diabetic controls) are evaluated: 1) Vehicle placebo control, 2) untreated group, and 3) treated group.

[1132] Wound closure is analyzed by measuring the area in the vertical and horizontal axis and obtaining the total square area of the wound. Contraction is then estimated by establishing the differences between the initial wound area (day 0) and that of post treatment (day 8). The wound area on day 1 is 64 mm², the corresponding size of the dermal punch. Calculations are made using the following formula:

[Open area on day 8]−[Open area on day 1]/[Open area on day 1]

[1133] Specimens are fixed in 10% buffered formalin and paraffin embedded blocks are sectioned perpendicular to the wound surface (5 mm) and cut using a Reichert-Jung microtome. Routine hematoxylin-eosin (H&E) staining is performed on cross-sections of bisected wounds. Histologic examination of the wounds are used to assess whether the healing process and the morphologic appearance of the repaired skin is altered by treatment with an agonist or antagonist of the invention. This assessment included verification of the presence of cell accumulation, inflammatory cells, capillaries, fibroblasts, re-epithelialization and epidermal maturity (Greenhalgh, D. G. et al., Am. J. Pathol. 136:1235 (1990)). A calibrated lens micrometer is used by a blinded observer.

[1134] Tissue sections are also stained immunohistochemically with a polyclonal rabbit anti-human keratin antibody using ABC Elite detection system. Human skin is used as a positive tissue control while non-immune IgG is used as a negative control. Keratinocyte growth is determined by evaluating the extent of reepithelialization of the wound using a calibrated lens micrometer.

[1135] Proliferating cell nuclear antigen/cyclin (PCNA) in skin specimens is demonstrated by using anti-PCNA antibody (1:50) with an ABC Elite detection system. Human colon cancer served as a positive tissue control and human brain tissue is used as a negative tissue control. Each specimen included a section with omission of the primary antibody and substitution with non-immune mouse IgG. Ranking of these sections is based on the extent of proliferation on a scale of 0-8, the lower side of the scale reflecting slight proliferation to the higher side reflecting intense proliferation.

[1136] Experimental data are analyzed using an unpaired t test. A p value of <0.05 is considered significant.

[1137] Steroid Impaired Rat Model

[1138] The inhibition of wound healing by steroids has been well documented in various in vitro and in vivo systems (Wahl, Glucocorticoids and Wound healing. In: Anti-Inflammatory Steroid Action: Basic and Clinical Aspects. 280-302 (1989); Wahlet al., J. Immunol. 115: 476-481 (1975); Werb et al., J. Exp. Med. 147:1684-1694 (1978)). Glucocorticoids retard wound healing by inhibiting angiogenesis, decreasing vascular permeability (Ebert et al., An. Intern. Med. 37:701-705 (1952)), fibroblast proliferation, and collagen synthesis (Beck et al., Growth Factors. 5: 295-304 (1991); Haynes et al., J. Clin. Invest. 61: 703-797 (1978)) and producing a transient reduction of circulating monocytes (Haynes et al., J. Clin. Invest. 61: 703-797 (1978); Wahl, “Glucocorticoids and wound healing”, In: Antiinflammatory Steroid Action: Basic and Clinical Aspects, Academic Press, New York, pp. 280-302 (1989)). The systemic administration of steroids to impaired wound healing is a well establish phenomenon in rats (Beck et al., Growth Factors. 5: 295-304 (1991); Haynes et al., J. Clin. Invest. 61: 703-797 (1978); Wahl, “Glucocorticoids and wound healing”, In: Antiinflammatory Steroid Action: Basic and Clinical Aspects, Academic Press, New York, pp. 280-302 (1989); Pierce et al., Proc. Natl. Acad. Sci. USA 86: 2229-2233 (1989)).

[1139] To demonstrate that an agonist or antagonist of the invention can accelerate the healing process, the effects of multiple topical applications of the agonist or antagonist on full thickness excisional skin wounds in rats in which healing has been impaired by the systemic administration of methylprednisolone is assessed.

[1140] Young adult male Sprague Dawley rats weighing 250-300 g (Charles River Laboratories) are used in this example. The animals are purchased at 8 weeks of age and are 9 weeks old at the beginning of the study. The healing response of rats is impaired by the systemic administration of methylprednisolone (17 mg/kg/rat intramuscularly) at the time of wounding. Animals are individually housed and received food and water ad libitum. All manipulations are performed using aseptic techniques. This study is conducted according to the rules and guidelines of Human Genome Sciences, Inc. Institutional Animal Care and Use Committee and the Guidelines for the Care and Use of Laboratory Animals.

[1141] The wounding protocol is followed according to section A, above. On the day of wounding, animals are anesthetized with an intramuscular injection of ketamine (50 mg/kg) and xylazine (5 mg/kg). The dorsal region of the animal is shaved and the skin washed with 70% ethanol and iodine solutions. The surgical area is dried with sterile gauze prior to wounding. An 8 mm full-thickness wound is created using a Keyes tissue punch. The wounds are left open for the duration of the experiment. Applications of the testing materials are given topically once a day for 7 consecutive days commencing on the day of wounding and subsequent to methylprednisolone administration. Prior to treatment, wounds are gently cleansed with sterile saline and gauze sponges.

[1142] Wounds are visually examined and photographed at a fixed distance at the day of wounding and at the end of treatment. Wound closure is determined by daily measurement on days 1-5 and on day 8. Wounds are measured horizontally and vertically using a calibrated Jameson caliper. Wounds are considered healed if granulation tissue is no longer visible and the wound is covered by a continuous epithelium.

[1143] The agonist or antagonist of the invention is administered using at a range different doses, from 4 mg to 500 mg per wound per day for 8 days in vehicle. Vehicle control groups received 50 mL of vehicle solution.

[1144] Animals are euthanized on day 8 with an intraperitoneal injection of sodium pentobarbital (300 mg/kg). The wounds and surrounding skin are then harvested for histology. Tissue specimens are placed in 10% neutral buffered formalin in tissue cassettes between biopsy sponges for further processing.

[1145] Three groups of 10 animals each (5 with methylprednisolone and 5 without glucocorticoid) are evaluated: 1) Untreated group 2) Vehicle placebo control 3) treated groups.

[1146] Wound closure is analyzed by measuring the area in the vertical and horizontal axis and obtaining the total area of the wound. Closure is then estimated by establishing the differences between the initial wound area (day 0) and that of post treatment (day 8). The wound area on day 1 is 64 mm , the corresponding size of the dermal punch. Calculations are made using the following formula:

[Open area on day 8]−[Open area on day 1]/[Open area on day 1]

[1147] Specimens are fixed in 10% buffered formalin and paraffin embedded blocks are sectioned perpendicular to the wound surface (5 mm) and cut using an Olympus microtome. Routine hematoxylin-eosin (H&E) staining is performed on cross-sections of bisected wounds. Histologic examination of the wounds allows assessment of whether the healing process and the morphologic appearance of the repaired skin is improved by treatment with an agonist or antagonist of the invention. A calibrated lens micrometer is used by a blinded observer to determine the distance of the wound gap.

[1148] Experimental data are analyzed using an unpaired t test. A p value of <0.05 is considered significant.

[1149] The studies described in this example tested activity of agonists or antagonists of the invention. However, one skilled in the art could easily modify the exemplified studies to test the activity of polynucleotides or polypeptides of the invention (e.g., gene therapy).

### Example 28

### Lymphadema Animal Model

[1150] The purpose of this experimental approach is to create an appropriate and consistent lymphedema model for testing the therapeutic effects of an agonist or antagonist of the invention in lymphangiogenesis and re-establishment of the lymphatic circulatory system in the rat hind limb. Effectiveness is measured by swelling volume of the affected limb, quantification of the amount of lymphatic vasculature, total blood plasma protein, and histopathology. Acute lymphedema is observed for 7-10 days. Perhaps more importantly, the chronic progress of the edema is followed for up to 3-4 weeks.

[1151] Prior to beginning surgery, blood sample is drawn for protein concentration analysis. Male rats weighing approximately ˜350 g are dosed with Pentobarbital. Subsequently, the right legs are shaved from knee to hip. The shaved area is swabbed with gauze soaked in 70% EtOH. Blood is drawn for serum total protein testing. Circumference and volumetric measurements are made prior to injecting dye into paws after marking 2 measurement levels (0.5 cm above heel, at mid-pt of dorsal paw). The intradermal dorsum of both right and left paws are injected with 0.05 ml of 1% Evan's Blue. Circumference and volumetric measurements are then made following injection of dye into paws.

[1152] Using the knee joint as a landmark, a mid-leg inguinal incision is made circumferentially allowing the femoral vessels to be located. Forceps and hemostats are used to dissect and separate the skin flaps. After locating the femoral vessels, the lymphatic vessel that runs along side and underneath the vessel(s) is located. The main lymphatic vessels in this area are then electrically coagulated or suture ligated.

[1153] Using a microscope, muscles in back of the leg (near the semitendinosis and adductors) are bluntly dissected. The popliteal lymph node is then located. The 2 proximal and 2 distal lymphatic vessels and distal blood supply of the popliteal node are then ligated by suturing. The popliteal lymph node, and any accompanying adipose tissue, is then removed by cutting connective tissues.

[1154] Care is taken to control any mild bleeding resulting from this procedure. After lymphatics are occluded, the skin flaps are sealed by using liquid skin (Vetbond) (AJ Buck). The separated skin edges are sealed to the underlying muscle tissue while leaving a gap of ˜0.5 cm around the leg. Skin also may be anchored by suturing to underlying muscle when necessary.

[1155] To avoid infection, animals are housed individually with mesh (no bedding). Recovering animals are checked daily through the optimal edematous peak, which typically occurred by day 5-7. The plateau edematous peak are then observed. To evaluate the intensity of the lymphedema, the circumference and volumes of 2 designated places on each paw before operation and daily for 7 days are measured. The effect of plasma proteins on lymphedema is determined and whether protein analysis is a useful testing perimeter is also investigated. The weights of both control and edematous limbs are evaluated at 2 places. Analysis is performed in a blind manner.

[1156] Circumference Measurements:

[1157] Under brief gas anesthetic to prevent limb movement, a cloth tape is used to measure limb circumference. Measurements are done at the ankle bone and dorsal paw by 2 different people and those 2 readings are averaged. Readings are taken from both control and edematous limbs.

[1158] Volumetric Measurements:

[1159] On the day of surgery, animals are anesthetized with Pentobarbital and are tested prior to surgery. For daily volumetrics animals are under brief halothane anesthetic (rapid immobilization and quick recovery), and both legs are shaved and equally marked using waterproof marker on legs. Legs are first dipped in water, then dipped into instrument to each marked level then measured by Buxco edema software(Chen/Victor). Data is recorded by one person, while the other is dipping the limb to marked area.

[1160] Blood-plasma Protein Measurements:

[1161] Blood is drawn, spun, and serum separated prior to surgery and then at conclusion for total protein and Ca2⁺ comparison.

[1162] Limb Weight Comparison:

[1163] After drawing blood, the animal is prepared for tissue collection. The limbs are amputated using a quillitine, then both experimental and control legs are cut at the ligature and weighed. A second weighing is done as the tibio-cacaneal joint is disarticulated and the foot is weighed.

[1164] Histological Preparations:

[1165] The transverse muscle located behind the knee (popliteal) area is dissected and arranged in a metal mold, filled with freezeGel, dipped into cold methylbutane, placed into labeled sample bags at −80EC until sectioning. Upon sectioning, the muscle is observed under fluorescent microscopy for lymphatics.

[1166] The studies described in this example tested activity of agonists or antagonists of the invention. However, one skilled in the art could easily modify the exemplified studies to test the activity of polynucleotides or polypeptides of the invention (e.g., gene therapy).

### Example 29

### Suppression of TNF Alpha-induced Adhesion Molecule Expression by an Agonist or Antagonist of the Invention

[1167] The recruitment of lymphocytes to areas of inflammation and angiogenesis involves specific receptor-ligand interactions between cell surface adhesion molecules (CAMs) on lymphocytes and the vascular endothelium. The adhesion process, in both normal and pathological settings, follows a multi-step cascade that involves intercellular adhesion molecule-1 (ICAM-1), vascular cell adhesion molecule-1 (VCAM-1), and endothelial leukocyte adhesion molecule-1 (E-selectin) expression on endothelial cells (EC). The expression of these molecules and others on the vascular endothelium determines the efficiency with which leukocytes may adhere to the local vasculature and extravasate into the local tissue during the development of an inflammatory response. The local concentration of cytokines and growth factor participate in the modulation of the expression of these CAMs.

[1168] Tumor necrosis factor alpha (TNF-a), a potent proinflammatory cytokine, is a stimulator of all three CAMs on endothelial cells and may be involved in a wide variety of inflammatory responses, often resulting in a pathological outcome.

[1169] The potential of an agonist or antagonist of the invention to mediate a suppression of TNF-a induced CAM expression can be examined. A modified ELISA assay which uses ECs as a solid phase absorbent is employed to measure the amount of CAM expression on TNF-a treated ECs when co-stimulated with a member of the FGF family of proteins.

[1170] To perform the experiment, human umbilical vein endothelial cell (HUVEC) cultures are obtained from pooled cord harvests and maintained in growth medium (EGM-2; Clonetics, San Diego, Calif.) supplemented with 10% FCS and 1% penicillin/streptomycin in a 37 degree C humidified incubator containing 5% CO₂. HUVECs are seeded in 96-well plates at concentrations of 1×10⁴ cells/well in EGM medium at 37 degree C for 18-24 hrs or until confluent. The monolayers are subsequently washed 3 times with a serum-free solution of RPMI-1640 supplemented with 100 U/ml penicillin and 100 mg/ml streptomycin, and treated with a given cytokine and/or growth factor(s) for 24 h at 37 degree C. Following incubation, the cells are then evaluated for CAM expression.

[1171] Human Umbilical Vein Endothelial cells (HUVECs) are grown in a standard 96 well plate to confluence. Growth medium is removed from the cells and replaced with 90 ul of 199 Medium (10% FBS). Samples for testing and positive or negative controls are added to the plate in triplicate (in 10 ul volumes). Plates are incubated at 37 degree C for either 5 h (selectin and integrin expression) or 24 h (integrin expression only). Plates are aspirated to remove medium and 100 μl of 0.1% paraformaldehyde-PBS(with Ca++ and Mg++) is added to each well. Plates are held at 4° C. for 30 min.

[1172] Fixative is then removed from the wells and wells are washed 1× with PBS(+Ca,Mg)+0.5% BSA and drained. Do not allow the wells to dry. Add 10 μl of diluted primary antibody to the test and control wells. Anti-ICAM-1-Biotin, Anti-VCAM-1-Biotin and Anti-E-selectin-Biotin are used at a concentration of 10 μg/ml (1:10 dilution of 0.1 mg/ml stock antibody). Cells are incubated at 37° C. for 30 min. in a humidified environment. Wells are washed X3 with PBS(+Ca,Mg)+0.5% BSA.

[1173] Then add 20 μl of diluted ExtrAvidin-Alkaline Phosphotase (1:5,000 dilution) to each well and incubated at 37° C. for 30 min. Wells are washed X3 with PBS(+Ca,Mg)+0.5% BSA. 1 tablet of p-Nitrophenol Phosphate pNPP is dissolved in 5 ml of glycine buffer (pH 10.4). 100 μl of pNPP substrate in glycine buffer is added to each test well. Standard wells in triplicate are prepared from the working dilution of the ExtrAvidin-Alkaline Phosphotase in glycine buffer: 1:5,000 (10⁰)>10^{-0.5}>10⁻¹>10^{-1.5}. 5 μl of each dilution is added to triplicate wells and the resulting AP content in each well is 5.50 ng, 1.74 ng, 0.55 ng, 0.18 ng. 100 μl of pNNP reagent must then be added to each of the standard wells. The plate must be incubated at 37° C. for 4 h. A volume of 50 μl of 3M NaOH is added to all wells. The results are quantified on a plate reader at 405 nm. The background subtraction option is used on blank wells filled with glycine buffer only. The template is set up to indicate the concentration of AP-conjugate in each standard well [5.50 ng; 1.74 ng; 0.55 ng; 0.18 ng]. Results are indicated as amount of bound AP-conjugate in each sample.

[1174] The studies described in this example tested activity of agonists or antagonists of the invention. However, one skilled in the art could easily modify the exemplified studies to test the activity of polynucleotides or polypeptides of the invention (e.g., gene therapy).

### Example 30

### Production of Polypeptide of the Invention for High-throughput Screening Assays

[1175] The following protocol produces a supernatant containing polypeptide of the present invention to be tested. This supernatant can then be used in the Screening Assays described in Examples 32-41.

[1176] First, dilute Poly-D-Lysine (644 587 Boehringer-Mannheim) stock solution (1 mg/ml in PBS) 1:20 in PBS (w/o calcium or magnesium 17-516F Biowhittaker) for a working solution of 50 ug/ml. Add 200 ul of this solution to each well (24 well plates) and incubate at RT for 20 minutes. Be sure to distribute the solution over each well (note: a 12-channel pipetter may be used with tips on every other channel). Aspirate off the Poly-D-Lysine solution and rinse with 1 ml PBS (Phosphate Buffered Saline). The PBS should remain in the well until just prior to plating the cells and plates may be poly-lysine coated in advance for up to two weeks.

[1177] Plate 293T cells (do not carry cells past P+20) at 2 x cells/well in 0.5 ml DMEM(Dulbecco's Modified Eagle Medium)(with 4.5 G/L glucose and L-glutamine (12-604F Biowhittaker))/10% heat inactivated FB S(14-503F Biowhittaker)/1× Penstrep(17-602E Blowhittaker). Let the cells grow overnight.

[1178] The next day, mix together in a sterile solution basin: 300 ul Lipofectamine (18324-012 Gibco/BRL) and 5 ml Optimem I (31985070 Gibco/BRL)/96-well plate. With a small volume multi-channel pipetter, aliquot approximately 2 ug of an expression vector containing a polynucleotide insert, produced by the methods described in Examples 8-10, into an appropriately labeled 96-well round bottom plate. With a multi-channel pipetter, add 50 ul of the Lipofectamine/Optimem I mixture to each well. Pipette up and down gently to mix. Incubate at RT 15-45 minutes. After about 20 minutes, use a multi-channel pipetter to add 150 ul Optimem I to each well. As a control, one plate of vector DNA lacking an insert should be transfected with each set of transfections.

[1179] Preferably, the transfection should be performed by tag-teaming the following tasks. By tag-teaming, hands on time is cut in half, and the cells do not spend too much time on PBS. First, person A aspirates off the media from four 24-well plates of cells, and then person Brinses each well with 0.5-1 ml PBS. Person Athen aspirates off PBS rinse, and person B, using a 12-channel pipetter with tips on every other channel, adds the 200 ul of DNA/Lipofectamine/Optimem I complex to the odd wells first, then to the even wells, to each row on the 24-well plates. Incubate at 37 degree C for 6 hours.

[1180] While cells are incubating, prepare appropriate media, either 1%BSA in DMEM with 1× penstrep, or HGS CHO-5 media (116.6 mg/L of CaCl2 (anhyd); 0.00130 mg/L CuSO₄-5H₂O; 0.050 mg/L of Fe(NO₃)₃-9H₂O; 0.417 mg/L of FeSO₄-7H₂O; 311.80 mg/L of Kcl; 28.64 mg/L of MgCl₂; 48.84 mg/L of MgSO₄; 6995.50 mg/L of NaCl; 2400.0 mg/L of NaHCO₃; 62.50 mg/L of NaH₂PO₄-H₂O; 71.02 mg/L of Na₂HPO4; 0.4320 mg/L of ZnSO₄-7H₂O; 0.002 mg/L of Arachidonic Acid; 1.022 mg/L of Cholesterol; 0.070 mg/L of DL-alpha-Tocopherol-Acetate; 0.0520 mg/L of Linoleic Acid; 0.010 mg/L of Linolenic Acid; 0.010 mg/L of Myristic Acid; 0.010 mg/L of Oleic Acid; 0.010 mg/L of Palmitric Acid; 0.010 mg/L of Palmitic Acid; 100 mg/L of Pluronic F-68; 0.010 mg/L of Stearic Acid; 2.20 mg/L of Tween 80; 4551 mg/L of D-Glucose; 130.85 mg/ml of L- Alanine; 147.50 mg/ml of L-Arginine-HCL; 7.50 mg/ml of L-Asparagine-H₂O; 6.65 mg/ml of L-Aspartic Acid; 29.56 mg/ml of L-Cystine-2HCL-H₂O; 31.29 mg/ml of L-Cystine-2HCL; 7.35 mg/ml of L-Glutamic Acid; 365.0 mg/ml of L-Glutamine; 18.75 mg/ml of Glycine; 52.48 mg/ml of L-Histidine-HCL-H₂O; 106.97 mg/ml of L-Isoleucine; 111.45 mg/ml of L-Leucine; 163.75 mg/ml of L-Lysine HCL; 32.34 mg/ml of L-Methionine; 68.48 mg/ml of L-Phenylalainine; 40.0 mg/ml of L-Proline; 26.25 mg/ml of L-Serine; 101.05 mg/ml of L-Threonine; 19.22 mg/ml of L-Tryptophan; 91.79 mg/ml of L-Tryrosine-2Na-2H₂O; and 99.65 mg/ml of L-Valine; 0.0035 mg/L of Biotin; 3.24 mg/L of D-Ca Pantothenate; 11.78 mg/L of Choline Chloride; 4.65 mg/L of Folic Acid; 15.60 mg/L of 1-Inositol; 3.02 mg/L of Niacinamide; 3.00 mg/L of Pyridoxal HCL; 0.031 mg/L of Pyridoxine HCL; 0.319 mg/L of Riboflavin; 3.17 mg/L of Thiamine HCL; 0.365 mg/L of Thymidine; 0.680 mg/L of Vitamin B₁₂; 25 mM of HEPES Buffer; 2.39 mg/L of Na Hypoxanthine; 0.105 mg/L of Lipoic Acid; 0.081 mg/L of Sodium Putrescine-2HCL; 55.0 mg/L of Sodium Pyruvate; 0.0067 mg/L of Sodium Selenite; 20 uM of Ethanolamine; 0.122 mg/L of Ferric Citrate; 41.70 mg/L of Methyl-B-Cyclodextrin complexed with Linoleic Acid; 33.33 mg/L of Methyl-B-Cyclodextrin complexed with Oleic Acid; 10 mg/L of Methyl-B-Cyclodextrin complexed with Retinal Acetate. Adjust osmolarity to 327 mOsm) with 2 mm glutamine and 1× penstrep. (BSA (81-068-3 Bayer) 100 gm dissolved in iL DMEM for a 10% BSA stock solution). Filter the media and collect 50 ul for endotoxin assay in 15 ml polystyrene conical.

[1181] The transfection reaction is terminated, preferably by tag-teaming, at the end of the incubation period. Person A aspirates off the transfection media, while person B adds 1.5 ml appropriate media to each well. Incubate at 37 degree C for 45 or 72 hours depending on the media used: 1% BSA for 45 hours or CHO-5 for 72 hours.

[1182] On day four, using a 300 ul multichannel pipetter, aliquot 600 ul in one lml deep well plate and the remaining supernatant into a 2 ml deep well. The supernatants from each well can then be used in the assays described in Examples 32-39.

[1183] It is specifically understood that when activity is obtained in any of the assays described below using a supernatant, the activity originates from either the polypeptide of the present invention directly (e.g., as a secreted protein) or by polypeptide of the present invention inducing expression of other proteins, which are then secreted into the supernatant. Thus, the invention further provides a method of identifying the protein in the supernatant characterized by an activity in a particular assay.

### Example 31

### Construction of GAS Reporter Construct

[1184] One signal transduction pathway involved in the differentiation and proliferation of cells is called the Jaks-STATs pathway. Activated proteins in the Jaks-STATs pathway bind to gamma activation site “GAS” elements or interferon-sensitive responsive element (“ISRE”), located in the promoter of many genes. The binding of a protein to these elements alter the expression of the associated gene.

[1185] GAS and ISRE elements are recognized by a class of transcription factors called Signal Transducers and Activators of Transcription, or “STATs.” There are six members of the STATs family. Stat1 and Stat3 are present in many cell types, as is Stat2 (as response to IFN-alpha is widespread). Stat4 is more restricted and is not in many cell types though it has been found in T helper class I, cells after treatment with IL-12. Stat5 was originally called mammary growth factor, but has been found at higher concentrations in other cells including myeloid cells. It can be activated in tissue culture cells by many cytokines.

[1186] The STATs are activated to translocate from the cytoplasm to the nucleus upon tyrosine phosphorylation by a set of kinases known as the Janus Kinase (“Jaks”) family. Jaks represent a distinct family of soluble tyrosine kinases and include Tyk2, Jak1, Jak2, and Jak3. These kinases display significant sequence similarity and are generally catalytically inactive in resting cells.

[1187] The Jaks are activated by a wide range of receptors summarized in the Table below. (Adapted from review by Schidler and Darnell, Ann. Rev. Biochem. 64:621-51 (1995)). A cytokine receptor family, capable of activating Jaks, is divided into two groups: (a) Class 1 includes receptors for IL-2, IL-3, IL-4, IL-6, IL-7, IL-9, IL-11, IL-12, IL-15, Epo, PRL, GH, G-CSF, GM-CSF, LIF, CNTF, and thrombopoietin; and (b) Class 2 includes IFN-a, IFN-g, and IL-10. The Class 1 receptors share a conserved cysteine motif (a set of four conserved cysteines and one tryptophan) and a WSXWS motif (a membrane proximal region encoding Trp-Ser-Xaa-Trp-Ser (SEQ ID NO: 2)).

[1188] Thus, on binding of a ligand to a receptor, Jaks are activated, which in turn activate STATs, which then translocate and bind to GAS elements. This entire process is encompassed in the Jaks-STATs signal transduction pathway. Therefore, activation of the Jaks-STATs pathway, reflected by the binding of the GAS or the ISRE element, can be used to indicate proteins involved in the proliferation and differentiation of cells. For example, growth factors and cytokines are known to activate the Jaks-STATs pathway (See Table below). Thus, by using GAS elements linked to reporter molecules, activators of the Jaks-STATs pathway can be identified.

| | | | | | | GAS |
|---|---|---|---|---|---|---|
| | | JAKs | | | | (elements) |
| Ligand | tyk2 | Jak1 | Jak2 | Jak3 | STATS | or ISRE |
| IFN family | | | | | | |
| IFN-a/B | + | + | − | − | 1,2,3 | ISRE |
| IFN-g | | + | + | − | 1 | GAS (IRF1 > |
| | | | | | | Lys6 > IFP) |
| Il-10 | + | ? | ? | − | 1,3 | |
| gp130 family | | | | | | |
| IL-6 | + | + | + | ? | 1,3 | GAS (IRF1 > |
| (Pleiotropic) | | | | | | Lys6 > IFP) |
| Il-11 | ? | + | ? | ? | 1,3 | |
| (Pleiotropic) | | | | | | |
| OnM | ? | + | + | ? | 1,3 | |
| (Pleiotropic) | | | | | | |
| LIF | ? | + | + | ? | 1,3 | |
| (Pleiotropic) | | | | | | |
| CNTF | −/+ | + | + | ? | 1,3 | |
| (Pleiotropic) | | | | | | |
| G-CSF | ? | + | ? | ? | 1,3 | |
| (Pleiotropic) | | | | | | |
| IL-12 | + | − | + | + | 1,3 | |
| (Pleiotropic) | | | | | | |
| g-C family | | | | | | |
| IL-2 | − | + | − | + | 1,3,5 | GAS |
| (lymphocytes) | | | | | | |
| IL-4 | − | + | − | + | 6 | GAS (IRF1 = |
| (lymph/myeloid) | | | | | | IFP >> Ly6) |
| | | | | | | (IgH) |
| IL-7 | − | + | − | + | 5 | GAS |
| (lymphocytes) | | | | | | |
| IL-9 | − | + | − | + | 5 | GAS |
| (lymphocytes) | | | | | | |
| IL-13 | − | + | ? | ? | 6 | GAS |
| (lymphocyte) | | | | | | |
| IL-15 | ? | + | ? | + | 5 | GAS |
| gp140 family | | | | | | |
| IL-3 (myeloid) | − | − | + | − | 5 | GAS (IRF1 > |
| | | | | | | IFP >> Ly6) |
| IL-5 (myeloid) | − | − | + | − | 5 | GAS |
| GM-CSF | − | − | + | − | 5 | GAS |
| (myeloid) | | | | | | |
| Growth hormone | | | | | | |
| family | | | | | | |
| GH | ? | − | + | − | 5 | |
| PRL | ? | +/− | + | − | 1,3,5 | |
| EPO | ? | − | + | − | 5 | GAS(B-CAS > |
| | | | | | | IRF1 = IFP >> |
| | | | | | | Ly6) |
| Receptor | | | | | | |
| Tyrosine Kinases | | | | | | |
| EGF | ? | + | + | − | 1,3 | GAS (IRF1) |
| PDGF | ? | + | + | − | 1,3 | |
| CSF-1 | ? | + | + | − | 1,3 | GAS (not |
| | | | | | | IRF1) |

[1189] To construct a synthetic GAS containing promoter element, which is used in the Biological Assays described in Examples 32-33, a PCR based strategy is employed to generate a GAS-SV40 promoter sequence. The 5′ primer contains four tandem copies of the GAS binding site found in the IRF1 promoter and previously demonstrated to bind STATs upon induction with a range of cytokines (Rothman et al., Immunity 1:457-468 (1994).), although other GAS or ISRE elements can be used instead. The 5′ primer also contains 18 bp of sequence complementary to the SV40 early promoter sequence and is flanked with an XhoI site. The sequence of the 5′ primer is:

[1190] 5′:GCGCCTCGAGATTTCCCCGAAATCTAGATTTCCCCGAAATGATTTCCCCGAAA TGATTTCCCCGAAATATCTGCCATCTCAATTAG:3′ (SEQ ID NO: 3)

[1191] The downstream primer is complementary to the SV40 promoter and is flanked with a Hind III site: 5′:GCGGCAAGCTTTTTGCAAAGCCTAGGC:3′ (SEQ ID NO: 4)

[1192] PCR amplification is performed using the SV40 promoter template present in the B-gal:promoter plasmid obtained from Clontech. The resulting PCR fragment is digested with XhoI/Hind III and subcloned into BLSK2-. (Stratagene.) Sequencing with forward and reverse primers confirms that the insert contains the following sequence:

| | |
|---|---|
| 5′:CTCGAGATTTCCCCGAAATCTAGATTTCCCCGAAATGATTTCCCCGAAATGAT | (SEQ ID NO:5) |
| TTCCCCGAAATATCTGCCATCTCAATTAGTCAGCAACCATAGTCCCGCCCCTAA | |
| CTCCGCCCATCCCGCCCCTAACTCCGCCCAGTTCCGCCCATTCTCCGCCCCATGG | |
| CTGACTAATTTTTTTTATTTATGCAGAGGCCGAGGCCGCCTCGGCCTCTGAGCTA | |
| TTCCAGAAGTAGTGAGGAGGCTTTTTTGGAGGCCTAGGCTTTTGCAAAAAGCTT:3′ | |

[1193] With this GAS promoter element linked to the SV40 promoter, a GAS:SEAP2 reporter construct is next engineered. Here, the reporter molecule is a secreted alkaline phosphatase, or “SEAP.” Clearly, however, any reporter molecule can be instead of SEAP, in this or in any of the other Examples. Well known reporter molecules that can be used instead of SEAP include chloramphenicol acetyltransferase (CAT), luciferase, alkaline phosphatase, B-galactosidase, green fluorescent protein (GFP), or any protein detectable by an antibody.

[1194] The above sequence confirmed synthetic GAS-SV40 promoter element is subcloned into the pSEAP-Promoter vector obtained from Clontech using HindIII and XhoI, effectively replacing the SV40 promoter with the amplified GAS:SV40 promoter element, to create the GAS-SEAP vector. However, this vector does not contain a neomycin resistance gene, and therefore, is not preferred for mammalian expression systems.

[1195] Thus, in order to generate mammalian stable cell lines expressing the GAS-SEAP reporter, the GAS-SEAP cassette is removed from the GAS-SEAP vector using SalI and NotI, and inserted into a backbone vector containing the neomycin resistance gene, such as pGFP-1 (Clontech), using these restriction sites in the multiple cloning site, to create the GAS-SEAP/Neo vector. Once this vector is transfected into mammalian cells, this vector can then be used as a reporter molecule for GAS binding as described in Examples 32-33.

[1196] Other constructs can be made using the above description and replacing GAS with a different promoter sequence. For example, construction of reporter molecules containing EGR and NF-KB promoter sequences are described in Examples 34 and 35. However, many other promoters can be substituted using the protocols described in these Examples. For instance, SRE, IL-2, NFAT, or Osteocalcin promoters can be substituted, alone or in combination (e.g., GAS/NF-KB/EGR, GAS/NF-KB, Il-2/NFAT, or NF-KB/GAS). Similarly, other cell lines can be used to test reporter construct activity, such as HELA (epithelial), HUVEC (endothelial), Reh (B-cell), Saos-2 (osteoblast), HUVAC (aortic), or Cardiomyocyte.

### Example 32

### High-throughput Screening Assay for T-cell Activity.

[1197] The following protocol is used to assess T-cell activity by identifying factors, and determining whether supemate containing a polypeptide of the invention proliferates and/or differentiates T-cells. T-cell activity is assessed using the GAS/SEAP/Neo construct produced in Example 31. Thus, factors that increase SEAP activity indicate the ability to activate the Jaks-STATS signal transduction pathway. The T-cell used in this assay is Jurkat T-cells (ATCC Accession No. TIB-152), although Molt-3 cells (ATCC Accession No. CRL-1552) and Molt-4 cells (ATCC Accession No. CRL-1582) cells can also be used.

[1198] Jurkat T-cells are lymphoblastic CD4+ Th1 helper cells. In order to generate stable cell lines, approximately 2 million Jurkat cells are transfected with the GAS-SEAP/neo vector using DMRIE-C (Life Technologies)(transfection procedure described below). The transfected cells are seeded to a density of approximately 20,000 cells per well and transfectants resistant to 1 mg/ml genticin selected. Resistant colonies are expanded and then tested for their response to increasing concentrations of interferon gamma. The dose response of a selected clone is demonstrated.

[1199] Specifically, the following protocol will yield sufficient cells for 75 wells containing 200 ul of cells. Thus, it is either scaled up, or performed in multiple to generate sufficient cells for multiple 96 well plates. Jurkat cells are maintained in RPMI +10% serum with 1%Pen-Strep. Combine 2.5 mls of OPTI-MEM (Life Technologies) with 10 ug of plasmid DNA in a T25 flask. Add 2.5 ml OPTI-MEM containing 50 ul of DMRIE-C and incubate at room temperature for 15-45 mins.

[1200] During the incubation period, count cell concentration, spin down the required number of cells (10⁷ per transfection), and resuspend in OPTI-MEM to a final concentration of 10⁷ cells/ml. Then add 1 ml of 1×10⁷ cells in OPTI-MEM to T25 flask and incubate at 37 degree C for 6 hrs. After the incubation, add 10 ml of RPMI+15% serum.

[1201] The Jurkat:GAS-SEAP stable reporter lines are maintained in RPMI+10% serum, 1 mg/ml Genticin, and 1% Pen-Strep. These cells are treated with supernatants containing polypeptide of the present invention or polypeptide of the present invention induced polypeptides as produced by the protocol described in Example 30.

[1202] On the day of treatment with the supernatant, the cells should be washed and resuspended in fresh RPMI+10% serum to a density of 500,000 cells per ml. The exact number of cells required will depend on the number of supernatants being screened. For one 96 well plate, approximately 10 million cells (for 10 plates, 100 million cells) are required.

[1203] Transfer the cells to a triangular reservoir boat, in order to dispense the cells into a 96 well dish, using a 12 channel pipette. Using a 12 channel pipette, transfer 200 ul of cells into each well (therefore adding 100,000 cells per well).

[1204] After all the plates have been seeded, 50 ul of the supernatants are transferred directly from the 96 well plate containing the supernatants into each well using a 12 channel pipette. In addition, a dose of exogenous interferon gamma (0.1, 1.0, 10 ng) is added to wells H9,H10, and H11 to serve as additional positive controls for the assay.

[1205] The 96 well dishes containing Jurkat cells treated with supernatants are placed in an incubator for 48 hrs (note: this time is variable between 48-72 hrs). 35 ul samples from each well are then transferred to an opaque 96 well plate using a 12 channel pipette. The opaque plates should be covered (using sellophene covers) and stored at −20 degree C until SEAP assays are performed according to Example 36. The plates containing the remaining treated cells are placed at 4 degree C and serve as a source of material for repeating the assay on a specific well if desired.

[1206] As a positive control, 100 Unit/ml interferon gamma can be used which is known to activate Jurkat T cells. Over 30 fold induction is typically observed in the positive control wells.

[1207] The above protocol may be used in the generation of both transient, as well as, stable transfected cells, which would be apparent to those of skill in the art.

### Example 33

### High-throughput Screening Assay Identifying Myeloid Activity

[1208] The following protocol is used to assess myeloid activity of polypeptide of the present invention by determining whether polypeptide of the present invention proliferates and/or differentiates myeloid cells. Myeloid cell activity is assessed using the GAS/SEAP/Neo construct produced in Example 31. Thus, factors that increase SEAP activity indicate the ability to activate the Jaks-STATS signal transduction pathway. The myeloid cell used in this assay is U937, a pre-monocyte cell line, although TF-1, HL60, or KG1 can be used.

[1209] To transiently transfect U937 cells with the GAS/SEAP/Neo construct produced in Example 31, a DEAE-Dextran method (Kharbanda et. al., 1994, Cell Growth & Differentiation, 5:259-265) is used. First, harvest 2×10⁷ U937 cells and wash with PBS. The U937 cells are usually grown in RPMI 1640 medium containing 10% heat-inactivated fetal bovine serum (FBS) supplemented with 100 units/ml penicillin and 100 mg/ml streptomycin.

[1210] Next, suspend the cells in 1 ml of 20 mM Tris-HCl (pH 7.4) buffer containing 0.5 mg/ml DEAE-Dextran, 8 ug GAS-SEAP2 plasmid DNA, 140 mM NaCl, 5 mM KCl, 375 uM Na₂HPO₄0.7H₂O, 1 mM MgCl₂, and 675 uM CaCl₂. Incubate at 37 degrees C for 45 min.

[1211] Wash the cells with RPMI 1640 medium containing 10% FBS and then resuspend in 10 ml complete medium and incubate at 37 degree C for 36 hr.

[1212] The GAS-SEAP/U937 stable cells are obtained by growing the cells in 400 ug/ml G418. The G418-free medium is used for routine growth but every one to two months, the cells should be re-grown in 400 ug/ml G418 for couple of passages.

[1213] These cells are tested by harvesting 1×10⁸ cells (this is enough for ten 96-well plates assay) and wash with PBS. Suspend the cells in 200 ml above described growth medium, with a final density of 5×10⁵ cells/ml. Plate 200 ul cells per well in the 96-well plate (or 1×10⁵ cells/well).

[1214] Add 50 ul of the supernatant prepared by the protocol described in Example 30. Incubate at 37 degee C for 48 to 72 hr. As a positive control, 100 Unit/ml interferon gamma can be used which is known to activate U937 cells. Over 30 fold induction is typically observed in the positive control wells. SEAP assay the supernatant according to the protocol described in Example 36.

### Example 34

### High-throughput Screening Assay Identifying Neuronal Activity.

[1215] When cells undergo differentiation and proliferation, a group of genes are activated through many different signal transduction pathways. One of these genes, EGR1(early growth response gene 1), is induced in various tissues and cell types upon activation. The promoter of EGR1 is responsible for such induction. Using the EGRI promoter linked to reporter molecules, activation of cells can be assessed by polypeptide of the present invention.

[1216] Particularly, the following protocol is used to assess neuronal activity in PC12 cell lines. PC12 cells (rat phenochromocytoma cells) are known to proliferate and/or differentiate by activation with a number of mitogens, such as TPA (tetradecanoyl phorbol acetate), NGF (nerve growth factor), and EGF (epidermal growth factor). The EGRI gene expression is activated during this treatment. Thus, by stably transfecting PC12 cells with a construct containing an EGR promoter linked to SEAP reporter, activation of PC12 cells by polyp eptide of the present invention can be assessed.

[1217] The EGR/SEAP reporter construct can be assembled by the following protocol. The EGR-1 promoter sequence (−633 to +1)(Sakamoto K et al., Oncogene 6:867-871 (1991)) can be PCR amplified from human genomic DNA using the following primers:

[1218] 5′ GCGCTCGAGGGATGACAGCGATAGAACCCCGG-3′ (SEQ ID NO: 6)

[1219] 5′ GCGAAGCTTCGCGACTCCCCGGATCCGCCTC-3′ (SEQ ID NO: 7)

[1220] Using the GAS:SEAP/Neo vector produced in Example 31, EGRI amplified product can then be inserted into this vector. Linearize the GAS:SEAP/Neo vector using restriction enzymes XhoI/HindIII, removing the GAS/SV40 stuffer. Restrict the EGR1 amplified product with these same enzymes. Ligate the vector and the EGR1 promoter.

[1221] To prepare 96 well-plates for cell culture, two mls of a coating solution (1:30 dilution of collagen type I (Upstate Biotech Inc. Cat#08-115) in 30% ethanol (filter sterilized)) is added per one 10 cm plate or 50 ml per well of the 96-well plate, and allowed to air dry for 2 hr.

[1222] PC12 cells are routinely grown in RPMI-1640 medium (Bio Whittaker) containing 10% horse serum (JRH BIOSCIENCES, Cat. # 12449-78P), 5% heat-inactivated fetal bovine serum (FBS) supplemented with 100 units/ml penicillin and 100 ug/ml streptomycin on a precoated 10 cm tissue culture dish. One to four split is done every three to four days. Cells are removed from the plates by scraping and resuspended with pipetting =up and down for more than 15 times.

[1223] Transfect the EGR/SEAP/Neo construct into PC12 using the Lipofectamine protocol described in Example 30. EGR-SEAP/PC12 stable cells are obtained by growing the cells in 300 ug/ml G418. The G418-free medium is used for routine growth but every one to two months, the cells should be re-grown in 300 ug/ml G418 for couple of passages.

[1224] To assay for neuronal activity, a 10 cm plate with cells around 70 to 80% confluent is screened by removing the old medium. Wash the cells once with PBS (Phosphate buffered saline). Then starve the cells in low serum medium (RPMI-1640 containing 1% horse serum and 0.5% FBS with antibiotics) overnight.

[1225] The next morning, remove the medium and wash the cells with PBS. Scrape off the cells from the plate, suspend the cells well in 2 ml low serum medium. Count the cell number and add more low serum medium to reach final cell density as 5×10⁵ cells/ml.

[1226] Add 200 ul of the cell suspension to each well of 96-well plate (equivalent to 1×10⁵ cells/well). Add 50 ul supernatant produced by Example 30, 37 degree C for 48 to 72 hr. As a positive control, a growth factor known to activate PC 12 cells through EGR can be used, such as 50 ng/ul of Neuronal Growth Factor (NGF). Over fifty-fold induction of SEAP is typically seen in the positive control wells. SEAP assay the supernatant according to Example 36.

### Example 35

### High-throughput Screening Assay for T-cell Activity

[1227] NF-KB (Nuclear Factor KB) is a transcription factor activated by a wide variety of agents including the inflammatory cytokines IL-1 and TNF, CD30 and CD40, lymphotoxin-alpha and lymphotoxin-beta, by exposure to LPS or thrombin, and by expression of certain viral gene products. As a transcription factor, NF-KB regulates the expression of genes involved in immune cell activation, control of apoptosis (NF-KB appears to shield cells from apoptosis), B and T-cell development, anti-viral and antimicrobial responses, and multiple stress responses.

[1228] In non-stimulated conditions, NF-KB is retained in the cytoplasm with I-KB (Inhibitor KB). However, upon stimulation, I-KB is phosphorylated and degraded, causing NF-KB to shuttle to the nucleus, thereby activating transcription of target genes. Target genes activated by NF-KB include IL-2, IL-6, GM-CSF, ICAM-1 and class 1 MHC.

[1229] Due to its central role and ability to respond to a range of stimuli, reporter constructs utilizing the NF-KB promoter element are used to screen the supernatants produced in Example 30. Activators or inhibitors of NF-KB would be useful in treating, preventing, and/or diagnosing diseases. For example, inhibitors of NF-KB could be used to treat those diseases related to the acute or chronic activation of NF-KB, such as rheumatoid arthritis.

[1230] To construct a vector containing the NF-KB promoter element, a PCR based strategy is employed. The upstream primer contains four tandem copies of the NF-KB binding site (GGGGACTTTCCC) (SEQ ID NO: 8), 18 bp of sequence complementary to the 5′ end of the SV40 early promoter sequence, and is flanked with an XhoI site:

[1231] 5′:GCGGCCTCGAGGGGACTTTCCCGGGGACTTTCCGGGGACTTTCCGGGACTTT CCATCCTGCCATCTCAATTAG:3′ (SEQ ID NO: 9)

[1232] The downstream primer is complementary to the 3′ end of the SV40 promoter and is flanked with a Hind III site:

[1233] 5′:GCGGCAAGCTTTTTGCAAAGCCTAGGC:3′ (SEQ ID NO: 4)

[1234] PCR amplification is performed using the SV40 promoter template present in the pB-gal:promoter plasmid obtained from Clontech. The resulting PCR fragment is digested with XhoI and Hind III and subcloned into BLSK2-. (Stratagene) Sequencing with the T7 and T3 primers confirms the insert contains the following sequence:

| | |
|---|---|
| 5′:CTCGAGGGGACTTTCCCGGGGACTTTCCGGGGACTTTCCGGGACTTTCCATCT | (SEQ ID NO:10) |
| GCCATCTCAATTAGTCAGCAACCATAGTCCCGCCCCTAACTCCGCCCATCCCGC | |
| CCCTAACTCCGCCCAGTTCCGCCCATTCTCCGCCCCATGGCTGACTAATTTTTTT | |
| TATTTATGCAGAGGCCGAGGCCGCCTCGGCCTCTGAGCTATTCCAGAAGTAGTG | |
| AGGAGGCTTTTTTGGAGGCCTAGGCTTTTGCAAAAAGCTT:3′ | |

[1235] Next, replace the SV40 minimal promoter element present in the pSEAP2-promoter plasmid (Clontech) with this NF-KB/SV40 fragment using XhoI and HindIII. However, this vector does not contain a neomycin resistance gene, and therefore, is not preferred for mammalian expression systems.

[1236] In order to generate stable mammalian cell lines, the NF-KB/SV40/SEAP cassette is removed from the above NF-KB/SEAP vector using restriction enzymes SalI and NotI, and inserted into a vector containing neomycin resistance. Particularly, the NF-KB/SV40/SEAP cassette was inserted into pGFP-1 (Clontech), replacing the GFP gene, after restricting pGFP-1 with SalI and NotI.

[1237] Once NF-KB/SV40/SEAP/Neo vector is created, stable Jurkat T-cells are created and maintained according to the protocol described in Example 32. Similarly, the method for assaying supernatants with these stable Jurkat T-cells is also described in Example 32. As a positive control, exogenous TNF alpha (0.1, 1, 10 ng) is added to wells H9,H10, and H11, with a 5-10 fold activation typically observed.

### Example 36

### Assay for SEAP Activity

[1238] As a reporter molecule for the assays described in Examples 32-35, SEAP activity is assayed using the Tropix Phospho-light Kit (Cat. BP-400) according to the following general procedure. The Tropix Phospho-light Kit supplies the Dilution, Assay, and Reaction Buffers used below.

[1239] Prime a dispenser with the 2.5× Dilution Buffer and dispense 15 ul of 2.5× dilution buffer into Optiplates containing 35 ul of a supernatant. Seal the plates with a plastic sealer and incubate at 65 degree C for 30 min. Separate the Optiplates to avoid uneven heating.

[1240] Cool the samples to room temperature for 15 minutes. Empty the dispenser and prime with the Assay Buffer. Add 50 ml Assay Buffer and incubate at room temperature 5 min. Empty the dispenser and prime with the Reaction Buffer (see the Table below). Add 50 ul Reaction Buffer and incubate at room temperature for 20 minutes. Since the intensity of the chemiluminescent signal is time dependent, and it takes about 10 minutes to read 5 plates on a luminometer, thus one should treat 5 plates at each time and start the second set 10 inutes later.

[1241] Read the relative light unit in the luminometer. Set H12 as blank, and print the results. An increase in chemiluminescence indicates reporter activity.

Reaction Buffer Formulation:

| # of plates | Rxn buffer diluent (ml) | CSPD (ml) |
|---|---|---|
| 10 | 60 | 3 |
| 11 | 65 | 3.25 |
| 12 | 70 | 3.5 |
| 13 | 75 | 3.75 |
| 14 | 80 | 4 |
| 15 | 85 | 4.25 |
| 16 | 90 | 4.5 |
| 17 | 95 | 4.75 |
| 18 | 100 | 5 |
| 19 | 105 | 5.25 |
| 20 | 110 | 5.5 |
| 21 | 115 | 5.75 |
| 22 | 120 | 6 |
| 23 | 125 | 6.25 |
| 24 | 130 | 6.5 |
| 25 | 135 | 6.75 |
| 26 | 140 | 7 |
| 27 | 145 | 7.25 |
| 28 | 150 | 7.5 |
| 29 | 155 | 7.75 |
| 30 | 160 | 8 |
| 31 | 165 | 8.25 |
| 32 | 170 | 8.5 |
| 33 | 175 | 8.75 |
| 34 | 180 | 9 |
| 35 | 185 | 9.25 |
| 36 | 190 | 9.5 |
| 37 | 195 | 9.75 |
| 38 | 200 | 10 |
| 39 | 205 | 10.25 |
| 40 | 210 | 10.5 |
| 41 | 215 | 10.75 |
| 42 | 220 | 11 |
| 43 | 225 | 11.25 |
| 44 | 230 | 11.5 |
| 45 | 235 | 11.75 |
| 46 | 240 | 12 |
| 47 | 245 | 12.25 |
| 48 | 250 | 12.5 |
| 49 | 255 | 12.75 |
| 50 | 260 | 13 |

### Example 37

### High-throughput Screening Assay Identifying Changes in Small Molecule Concentration and Membrane Permeability

[1242] Binding of a ligand to a receptor is known to alter intracellular levels of small molecules, such as calcium, potassium, sodium, and pH, as well as alter membrane potential. These alterations can be measured in an assay to identify supernatants which bind to receptors of a particular cell. Although the following protocol describes an assay for calcium, this protocol can easily be modified to detect changes in potassium, sodium, pH, membrane potential, or any other small molecule which is detectable by a fluorescent probe.

[1243] The following assay uses Fluorometric Imaging Plate Reader (“FLIPR”) to measure changes in fluorescent molecules (Molecular Probes) that bind small molecules. Clearly, any fluorescent molecule detecting a small molecule can be used instead of the calcium fluorescent molecule, fluo-4 (Molecular Probes, Inc.; catalog no. F-14202), used here.

[1244] For adherent cells, seed the cells at 10,000-20,000 cells/well in a Co-star black 96-well plate with clear bottom. The plate is incubated in a CO₂ incubator for 20 hours. The adherent cells are washed two times in Biotek washer with 200 ul of HBSS (Hank's Balanced Salt Solution) leaving 100 ul of buffer after the final wash.

[1245] A stock solution of 1 mg/ml fluo-4 is made in 10% pluronic acid DMSO. To load the cells with fluo-4, 50 ul of 12 ug/ml fluo-4 is added to each well. The plate is incubated at 37 degrees C in a CO₂ incubator for 60 min. The plate is washed four times in the Biotek washer with HBSS leaving 100 ul of buffer.

[1246] For non-adherent cells, the cells are spun down from culture media. Cells are re-suspended to 2-5×10⁶ cells/ml with HBSS in a 50-ml conical tube. 4 ul of 1 mg/ml fluo-4 solution in 10% pluronic acid DMSO is added to each ml of cell suspension. The tube is then placed in a 37 degrees C water bath for 30-60 min. The cells are washed twice with HBSS, resuspended to 1×10⁶ cells/ml, and dispensed into a microplate, 100 ul/well. The plate is centrifuged at 1000 rpm for 5 min. The plate is then washed once in Denley Cell Wash with 200 ul, followed by an aspiration step to 100 ul final volume.

[1247] For a non-cell based assay, each well contains a fluorescent molecule, such as fluo-4. The supernatant is added to the well, and a change in fluorescence is detected.

[1248] To measure the fluorescence of intracellular calcium, the FLIPR is set for the following parameters: (1) System gain is 300-800 mW; (2) Exposure time is 0.4 second; (3) Camera F/stop is F/2; (4) Excitation is 488 nm; (5) Emission is 530 nm; and (6) Sample addition is 50 ul. Increased emission at 530 nm indicates an extracellular signaling event caused by the a molecule, either polypeptide of the present invention or a molecule induced by polypeptide of the present invention, which has resulted in an increase in the intracellular Ca⁺⁺ concentration.

### Example 38

### High-throughput Screening Assay Identifying Tyrosine Kinase Activity

[1249] The Protein Tyrosine Kinases (PTK) represent a diverse group of transmembrane and cytoplasmic kinases. Within the Receptor Protein Tyrosine Kinase RPTK) group are receptors for a range of mitogenic and metabolic growth factors including the PDGF, FGF, EGF, NGF, HGF and Insulin receptor subfamilies. In addition there are a large family of RPTKs for which the corresponding ligand is unknown. Ligands for RPTKs include mainly secreted small proteins, but also membrane-bound and extracellular matrix proteins.

[1250] Activation of RPTK by ligands involves ligand-mediated receptor dimerization, resulting in transphosphorylation of the receptor subunits and activation of the cytoplasmic tyrosine kinases. The cytoplasmic tyrosine kinases include receptor associated tyrosine kinases of the src-family (e.g., src, yes, lck, lyn, fyn) and non-receptor linked and cytosolic protein tyrosine kinases, such as the Jak family, members of which mediate signal transduction triggered by the cytokine superfamily of receptors (e.g., the Interleukins, Interferons, GM-CSF, and Leptin).

[1251] Because of the wide range of known factors capable of stimulating tyrosine kinase activity, identifying whether polypeptide of the present invention or a molecule induced by polypeptide of the present invention is capable of activating tyrosine kinase signal transduction pathways is of interest. Therefore, the following protocol is designed to identify such molecules capable of activating the tyrosine kinase signal transduction pathways.

[1252] Seed target cells (e.g., primary keratinocytes) at a density of approximately 25,000 cells per well in a 96 well Loprodyne Silent Screen Plates purchased from Nalge Nunc (Naperville, Ill.). The plates are sterilized with two 30 minute rinses with 100% ethanol, rinsed with water and dried overnight. Some plates are coated for 2 hr with 100 ml of cell culture grade type I collagen (50 mg/ml), gelatin (2%) or polylysine (50 mg/ml), all of which can be purchased from Sigma Chemicals (St. Louis, Mo.) or 10% Matrigel purchased from Becton Dickinson (Bedford, Mass.), or calf serum, rinsed with PBS and stored at 4 degree C. Cell growth on these plates is assayed by seeding 5,000 cells/well in growth medium and indirect quantitation of cell number through use of alamarBlue as described by the manufacturer Alamar Biosciences, Inc. (Sacramento, Calif.) after 48 hr. Falcon plate covers #3071 from Becton Dickinson (Bedford, Mass.) are used to cover the Loprodyne Silent Screen Plates. Falcon Microtest III cell culture plates can also be used in some proliferation experiments.

[1253] To prepare extracts, A431 cells are seeded onto the nylon membranes of Loprodyne plates (20,000/200 ml/well) and cultured overnight in complete medium. Cells are quiesced by incubation in serum-free basal medium for 24 hr. After 5-20 minutes treatment with EGF (60 ng/ml) or 50 ul of the supernatant produced in Example 30, the medium was removed and 100 ml of extraction buffer ((20 mM HEPES pH 7.5, 0.15 M NaCl, 1% Triton X-100, 0.1% SDS, 2 mM Na3VO4, 2 mM Na4P207 and a cocktail of protease inhibitors (# 1836170) obtained from Boeheringer Mannheim (Indianapolis, Ind.)) is added to each well and the plate is shaken on a rotating shaker for 5 minutes at 4° C. The plate is then placed in a vacuum transfer manifold and the extract filtered through the 0.45 mm membrane bottoms of each well using house vacuum. Extracts are collected in a 96-well catch/assay plate in the bottom of the vacuum manifold and immediately placed on ice. To obtain extracts clarified by centrifugation, the content of each well, after detergent solubilization for 5 minutes, is removed and centrifuged for 15 minutes at 4 degree C at 16,000× g.

[1254] Test the filtered extracts for levels of tyrosine kinase activity. Although many methods of detecting tyrosine kinase activity are known, one method is described here.

[1255] Generally, the tyrosine kinase activity of a supernatant is evaluated by determining its ability to phosphorylate a tyrosine residue on a specific substrate (a biotinylated peptide). Biotinylated peptides that can be used for this purpose include PSK1 (corresponding to amino acids 6-20 of the cell division kinase cdc2-p34) and PSK2 (corresponding to amino acids 1-17 of gastrin). Both peptides are substrates for a range of tyrosine kinases and are available from Boehringer Mannheim.

[1256] The tyrosine kinase reaction is set up by adding the following components in order. First, add 10 ul of 5 uM Biotinylated Peptide, then 10 ul ATP/Mg₂₊ (5 mM ATP/50 mM MgCl₂), then 10 ul of 5× Assay Buffer (40 mM imidazole hydrochloride, pH 7.3, 40 mM beta-glycerophosphate, 1 mM EGTA, 100 mM MgCl₂, 5 mM MnCl₂, 0.5 mg/ml BSA), then 5 ul of Sodium Vanadate(1 mM), and then 5 ul of water. Mix the components gently and preincubate the reaction mix at 30 degree C for 2 min. Initial the reaction by adding 10 ul of the control enzyme or the filtered supernatant.

[1257] The tyrosine kinase assay reaction is then terminated by adding 10 ul of 120 mm EDTA and place the reactions on ice.

[1258] Tyrosine kinase activity is determined by transferring 50 ul aliquot of reaction mixture to a microtiter plate (MTP) module and incubating at 37 degree C for 20 min. This allows the streptavidin coated 96 well plate to associate with the biotinylated peptide. Wash the MTP module with 300 ul/well of PBS four times. Next add 75 ul of anti-phospotyrosine antibody conjugated to horse radish peroxidase(anti-P-Tyr-POD(0.5 u/ml)) to each well and incubate at 37 degree C for one hour. Wash the well as above.

[1259] Next add 100 ul of peroxidase substrate solution (Boehringer Mannheim) and incubate at room temperature for at least 5 mins (up to 30 min). Measure the absorbance of the sample at 405 nm by using ELISA reader. The level of bound peroxidase activity is quantitated using an ELISA reader and reflects the level of tyrosine kinase activity.

### Example 39

### High-throughput Screening Assay Identifying Phosphorylation Activity

[1260] As a potential alternative and/or complement to the assay of protein tyrosine kinase activity described in Example 38, an assay which detects activation (phosphorylation) of major intracellular signal transduction intermediates can also be used. For example, as described below one particular assay can detect tyrosine phosphorylation of the Erk-1 and Erk-2 kinases. However, phosphorylation of other molecules, such as Raf, JNK, p38 MAP, Map kinase kinase (MEK), MEK kinase, Src, Muscle specific kinase (MuSK), IRAK, Tec, and Janus, as well as any other phosphoserine, phosphotyrosine, or phosphothreonine molecule, can be detected by substituting these molecules for Erk-1 or Erk-2 in the following assay.

[1261] Specifically, assay plates are made by coating the wells of a 96-well ELISA plate with 0.1 ml of protein G (1 ug/ml) for 2 hr at room temp, (RT). The plates are then rinsed with PBS and blocked with 3% BSA/PBS for 1 hr at RT. The protein G plates are then treated with 2 commercial monoclonal antibodies (10 ng/well) against Erk-1 and Erk-2 (1 hr at RT) (Santa Cruz Biotechnology). (To detect other molecules, this step can easily be modified by substituting a monoclonal antibody detecting any of the above described molecules.) After 3-5 rinses with PBS, the plates are stored at 4 degree C until use.

[1262] A431 cells are seeded at 20,000/well in a 96-well Loprodyne filterplate and cultured overnight in growth medium. The cells are then starved for 48 hr in basal medium (DMEM) and then treated with EGF (6 ng/well) or 50 ul of the supernatants obtained in Example 30 for 5-20 minutes. The cells are then solubilized and extracts filtered directly into the assay plate.

[1263] After incubation with the extract for 1 hr at RT, the wells are again rinsed. As a positive control, a commercial preparation of MAP kinase (10 ng/well) is used in place of A431 extract. Plates are then treated with a commercial polyclonal (rabbit) antibody (lug/ml) which specifically recognizes the phosphorylated epitope of the Erk-1 and Erk-2 kinases (1 hr at RT). This antibody is biotinylated by standard procedures. The bound polyclonal antibody is then quantitated by successive incubations with Europium-streptavidin and Europium fluorescence enhancing reagent in the Wallac DELFIA instrument (time-resolved fluorescence). An increased fluorescent signal over background indicates a phosphorylation by polypeptide of the present invention or a molecule induced by polypeptide of the present invention.

### Example 40

### Assay for the Stimulation of Bone Marrow CD34+ Cell Proliferation

[1264] This assay is based on the ability of human CD34+ to proliferate in the presence of hematopoietic growth factors and evaluates the ability of isolated polypeptides expressed in mammalian cells to stimulate proliferation of CD34+ cells.

[1265] It has been previously shown that most mature precursors will respond to only a single signal. More immature precursors require at least two signals to respond. Therefore, to test the effect of polypeptides on hematopoietic activity of a wide range of progenitor cells, the assay contains a given polypeptide in the presence or absence of other hematopoietic growth factors. Isolated cells are cultured for 5 days in the presence of Stem Cell Factor (SCF) in combination with tested sample. SCF alone has a very limited effect on the proliferation of bone marrow (BM) cells, acting in such conditions only as a “survival” factor. However, combined with any factor exhibiting stimulatory effect on these cells (e.g., IL-3), SCF will cause a synergistic effect. Therefore, if the tested polypeptide has a stimulatory effect on hematopoietic progenitors, such activity can be easily detected. Since normal BM cells have a low level of cycling cells, it is likely that any inhibitory effect of a given polypeptide, or agonists or antagonists thereof, might not be detected. Accordingly, assays for an inhibitory effect on progenitors is preferably tested in cells that are first subjected to in vitro stimulation with SCF+IL+3, and then contacted with the compound that is being evaluated for inhibition of such induced proliferation.

[1266] Briefly, CD34+ cells are isolated using methods known in the art. The cells are thawed and resuspended in medium (QBSF 60 serum-free medium with 1% L-glutamine (500 ml) Quality Biological, Inc., Gaithersburg, Md. Cat# 160-204-101). After several gentle centrifugation steps at 200× g, cells are allowed to rest for one hour. The cell count is adjusted to 2.5×10⁵ cells/ml. During this time, 100 μl of sterile water is added to the peripheral wells of a 96-well plate. The cytokines that can be tested with a given polypeptide in this assay is rhSCF (R&D Systems, Minneapolis, MN, Cat# 255-SC) at 50 ng/ml alone and in combination with rhSCF and rhIL-3 (R&D Systems, Minneapolis, Minn., Cat# 203-ML) at 30 ng/ml. After one hour, 10 μμl of prepared cytokines, 50 μl of the supernatants prepared in Example 30 (supernatants at 1:2 dilution=50 μl) and 20 μl of diluted cells are added to the media which is already present in the wells to allow for a final total volume of 100 μl. The plates are then placed in a 37° C./5% CO₂ incubator for five days.

[1267] Eighteen hours before the assay is harvested, 0.5 μCi/well of [3H] Thymidine is added in a 10 μl volume to each well to determine the proliferation rate. The experiment is terminated by harvesting the cells from each 96-well plate to a filtermat using the Tomtec Harvester 96. After harvesting, the filtermats are dried, trimmed and placed into OmniFilter assemblies consisting of one OmniFilter plate and one OmniFilter Tray. 60 μl Microscint is added to each well and the plate sealed with TopSeal-A press-on sealing film A bar code 15 sticker is affixed to the first plate for counting. The sealed plates are then loaded and the level of radioactivity determined via the Packard Top Count and the printed data collected for analysis. The level of radioactivity reflects the amount of cell proliferation.

[1268] The studies described in this example test the activity of a given polypeptide to stimulate bone marrow CD34+ cell proliferation. One skilled in the art could easily modify the exemplified studies to test the activity of polynucleotides (e.g., gene therapy), antibodies, agonists, and/or antagonists and fragments and variants thereof. As a nonlimiting example, potential antagonists tested in this assay would be expected to inhibit cell proliferation in the presence of cytokines and/or to increase the inhibition of cell proliferation in the presence of cytokines and a given polypeptide. In contrast, potential agonists tested in this assay would be expected to enhance cell proliferation and/or to decrease the inhibition of cell proliferation in the presence of cytokines and a given polypeptide.

[1269] The ability of a gene to stimulate the proliferation of bone marrow CD34+cells indicates that polynucleotides and polypeptides corresponding to the gene are useful for the diagnosis and treatment of disorders affecting the immune system and hematopoiesis. Representative uses are described in the “Immune Activity” and “Infectious Disease” sections above, and elsewhere herein.

### Example 41

### Assay for Extracellular Matrix Enhanced Cell Response (EMECR)

[1270] The objective of the Extracellular Matrix Enhanced Cell Response (EMECR) assay is to identify gene products (e.g., isolated polypeptides) that act on the hematopoietic stem cells in the context of the extracellular matrix (ECM) induced signal.

[1271] Cells respond to the regulatory factors in the context of signal(s) received from the surrounding microenvironment. For example, fibroblasts, and endothelial and epithelial stem cells fail to replicate in the absence of signals from the ECM. Hematopoietic stem cells can undergo self-renewal in the bone marrow, but not in in vitro suspension culture. The ability of stem cells to undergo self-renewal in vitro is dependent upon their interaction with the stromal cells and the ECM protein fibronectin (fn). Adhesion of cells to fn is mediated by the α₅.β₁ and α₄.-β₁ integrin receptors, which are expressed by human and mouse hematopoietic stem cells. The factor(s) which integrate with the ECM environment and are responsible for stimulating stem cell self-renewal havea not yet been identified. Discovery of such factors should be of great interest in gene therapy and bone marrow transplant applications

[1272] Briefly, polystyrene, non tissue culture treated, 96-well plates are coated with fn fragment at a coating concentration of 0.2 μg/cm². Mouse bone marrow cells are plated (1,000 cells/well) in 0.2 ml of serum-free medium. Cells cultured in the presence of IL-3 ( 5 ng/ml)+SCF (50 ng/ml) would serve as the positive control, conditions under which little self-renewal but pronounced differentiation of the stem cells is to be expected. Gene products of the invention (e.g., including, but not limited to, polynucleotides and polypeptides of the present invention, and supernatants produced in Example 30), are tested with appropriate negative controls in the presence and absence of SCF(5.0 ng/ml), where test factor supernatants represent 10% of the total assay volume. The plated cells are then allowed to grow by incubating in a low oxygen environment (5% CO₂, 7% O₂, and 88% N₂ ) tissue culture incubator for 7 days. The number of proliferating cells within the wells is then quantitated by measuring thymidine incorporation into cellular DNA. Verification of the positive hits in the assay will require phenotypic characterization of the cells, which can be accomplished by scaling up of the culture system and using appropriate antibody reagents against cell surface antigens and FACScan.

[1273] One skilled in the art could easily modify the exemplified studies to test the activity of polynucleotides (e.g., gene therapy), antibodies, agonists, and/or antagonists and fragments and variants thereof.

[1274] If a particular polypeptide of the present invention is found to be a stimulator of hematopoietic progenitors, polynucleotides and polypeptides corresponding to the gene encoding said polypeptide may be useful for the diagnosis and treatment of disorders affecting the immune system and hematopoiesis. Representative uses are described in the “Immune Activity” and “Infectious Disease” sections above, and elsewhere herein. The gene product may also be useful in the expansion of stem cells and committed progenitors of various blood lineages, and in the differentiation and/or proliferation of various cell types.

[1275] Additionally, the polynucleotides and/or polypeptides of the gene of interest and/or agonists and/or antagonists thereof, may also be employed to inhibit the proliferation and differentiation of hematopoietic cells and therefore may be employed to protect bone marrow stem cells from chemotherapeutic agents during chemotherapy. This antiproliferative effect may allow administration of higher doses of chemotherapeutic agents and, therefore, more effective chemotherapeutic treatment.

[1276] Moreover, polynucleotides and polypeptides corresponding to the gene of interest may also be useful for the treatment and diagnosis of hematopoietic related disorders such as, for example, anemia, pancytopenia, leukopenia, thrombocytopenia or leukemia since stromal cells are important in the production of cells of hematopoietic lineages. The uses include bone marrow cell ex-vivo culture, bone marrow transplantation, bone marrow reconstitution, radiotherapy or chemotherapy of neoplasia.

### Example 42

### Human Dermal Fibroblast and Aortic Smooth Muscle Cell Proliferation

[1277] The polypeptide of interest is added to cultures of normal human dermal fibroblasts (NHDF) and human aortic smooth muscle cells (AoSMC) and two co-assays are performed with each sample. The first assay examines the effect of the polypeptide of interest on the proliferation of normal human dermal fibroblasts (NHDF) or aortic smooth muscle cells (AoSMC). Aberrant growth of fibroblasts or smooth muscle cells is a part of several pathological processes, including fibrosis, and restenosis. The second assay examines IL6 production by both NHDF and SMC. IL6 production is an indication of functional activation. Activated cells will have increased production of a number of cytokines and other factors, which can result in a proinflammatory or immunomodulatory outcome. Assays are run with and without co-TNFa stimulation, in order to check for costimulatory or inhibitory activity.

[1278] Briefly, on day 1, 96-well black plates are set up with 1000 cells/well (NHDF) or 2000 cells/well (AOSMC) in 100 μl culture media. NHDF culture media contains: Clonetics FB basal media, 1 mg/ml hFGF, 5 mg/ml insulin, 50 mg/ml gentamycin, 2%FBS, while AoSMC culture media contains Clonetics SM basal media, 0.5 μg/ml hEGF, 5 mg/ml insulin, 1 μg/ml hFGF, 50 mg/ml gentamycin, 50 μg/ml Amphotericin B, 5%FBS. After incubation at 37° C. for at least 4-5 hours culture media is aspirated and replaced with growth arrest media. Growth arrest media for NHDF contains fibroblast basal media, 50 mg/ml gentamycin, 2% FBS, while growth arrest media for AoSMC contains SM basal media, 50 mg/ml gentamycin, 50 μg/ml Amphotericin B, 0.4% FBS. Incubate at 37° C. until day 2.

[1279] On day 2, serial dilutions and templates of the polypeptide of interest are designed such that they always include media controls and known-protein controls. For both stimulation and inhibition experiments, proteins are diluted in growth arrest media. For inhibition experiments, TNFa is added to a final concentration of 2 ng/ml (NHDF) or 5 ng/ml (AoSMC). Add 1/3 vol media containing controls or polypeptides of the present invention and incubate at 37 degrees C/5% CO₂ until day 5.

[1280] Transfer 60 μl from each well to another labeled 96-well plate, cover with a plate-sealer, and store at 4 degrees C until Day 6 (for IL6 ELISA). To the remaining 100 μl in the cell culture plate, aseptically add Alamar Blue in an amount equal to 10% of the culture volume (10 μl). Return plates to incubator for 3 to 4 hours. Then measure fluorescence with excitation at 530 nm and emission at 590 nm using the CytoFluor. This yields the growth stimulation/inhibition data.

[1281] On day 5, the IL6 ELISA is performed by coating a 96 well plate with 50-100 ul/well of Anti-Human IL6 Monoclonal antibody diluted in PBS, pH 7.4, incubate ON at room temperature.

[1282] On day 6, empty the plates into the sink and blot on paper towels. Prepare Assay Buffer containing PBS with 4% BSA. Block the plates with 200 μl/well of Pierce Super Block blocking buffer in PBS for 1-2 hr and then wash plates with wash buffer (PBS, 0.05% Tween-20). Blot plates on paper towels. Then add 50 μl/well of diluted Anti-Human IL-6 Monoclonal, Biotin-labeled antibody at 0.50 mg/ml. Make dilutions of IL-6 stock in media (30, 10, 3, 1, 0.3, 0 ng/ml). Add duplicate samples to top row of plate. Cover the plates and incubate for 2 hours at RT on shaker.

[1283] Plates are washed with wash buffer and blotted on paper towels. Dilute EU-labeled Streptavidin 1:1000 in Assay buffer, and add 100 μl/well. Cover the plate and incubate 1 h at RT. Plates are again washed with wash buffer and blotted on paper towels.

[1284] Add 100 μl/well of Enhancement Solution. Shake for 5 minutes. Read the plate on the Wallac DELFIA Fluorometer. Readings from triplicate samples in each assay were tabulated and averaged.

[1285] A positive result in this assay suggests AoSMC cell proliferation and that the polypeptide of the present invention may be involved in dermal fibroblast proliferation and/or smooth muscle cell proliferation. A positive result also suggests many potential uses of polypeptides, polynucleotides, agonists and/or antagonists of the polynucleotide/polypeptide of the present invention which gives a positive result. For example, inflammation and immune responses, wound healing, and angiogenesis, as detailed throughout this specification. Particularly, polypeptides of the present invention and polynucleotides of the present invention may be used in wound healing and dermal regeneration, as well as the promotion of vasculogenesis, both of the blood vessels and lymphatics. The growth of vessels can be used in the treatment of, for example, cardiovascular diseases. Additionally, antagonists of polypeptides and polynucleotides of the invention may be useful in treating diseases, disorders, and/or conditions which involve angiogenesis by acting as an anti-vascular agent (e.g., anti-angiogenesis). These diseases, disorders, and/or conditions are known in the art and/or are described herein, such as, for example, malignancies, solid tumors, benign tumors, for example hemangiomas, acoustic neuromas, neurofibromas, trachomas, and pyogenic granulomas; artheroscleric plaques; ocular angiogenic diseases, for example, diabetic retinopathy, retinopathy of prematurity, macular degeneration, corneal graft rejection, neovascular glaucoma, retrolental fibroplasia, rubeosis, retinoblastoma, uvietis and Pterygia (abnormal blood vessel growth) of the eye; rheumatoid arthritis; psoriasis; delayed wound healing; endometriosis; vasculogenesis; granulations; hypertrophic scars (keloids); nonunion fractures; scleroderma; trachoma; vascular adhesions; myocardial angiogenesis; coronary collaterals; cerebral collaterals; arteriovenous malformations; ischemic limb angiogenesis; Osler-Webber Syndrome; plaque neovascularization; telangiectasia; hemophiliac joints; angiofibroma; fibromuscular dysplasia; wound granulation; Crohn's disease; and atherosclerosis. Moreover, antagonists of polypeptides and polynucleotides of the invention may be useful in treating anti-hyperproliferative diseases and/or anti-inflammatory known in the art and/or described herein.

[1286] One skilled in the art could easily modify the exemplified studies to test the activity of polynucleotides (e.g., gene therapy), antibodies, agonists, and/or antagonists and fragments and variants thereof.

### Example 43

### Cellular Adhesion Molecule (CAM) Expression on Endothelial Cells

[1287] The recruitment of lymphocytes to areas of inflammation and angiogenesis involves specific receptor-ligand interactions between cell surface adhesion molecules (CAMs) on lymphocytes and the vascular endothelium. The adhesion process, in both normal and pathological settings, follows a multi-step cascade that involves intercellular adhesion molecule-1 (ICAM-1), vascular cell adhesion molecule-1 (VCAM-1), and endothelial leukocyte adhesion molecule-1 (E-selectin) expression on endothelial cells (EC). The expression of these molecules and others on the vascular endothelium determines the efficiency with which leukocytes may adhere to the local vasculature and extravasate into the local tissue during the development of an inflammatory response. The local concentration of cytokines and growth factor participate in the modulation of the expression of these CAMs.

[1288] Briefly, endothelial cells (e.g., Human Umbilical Vein Endothelial cells (HUVECs)) are grown in a standard 96 well plate to confluence, growth medium is removed from the cells and replaced with 100 μl of 199 Medium (10% fetal bovine serum (FBS)). Samples for testing and positive or negative controls are added to the plate in triplicate (in 10 μl volumes). Plates are then incubated at 37° C. for either 5 h (selectin and integrin expression) or 24 h (integrin expression only). Plates are aspirated to remove medium and 100 μl of 0.1% paraformaldehyde-PBS(with Ca++ and Mg++) is added to each well. Plates are held at 4° C. for 30 min. Fixative is removed from the wells and wells are washed IX with PBS(+Ca,Mg) +0.5% BSA and drained. 10 μl of diluted primary antibody is added to the test and control wells. Anti-ICAM-1-Biotin, Anti-VCAM-1-Biotin and Anti-E-selectin-Biotin are used at a concentration of 10 μg/ml (1:10 dilution of 0.1 mg/ml stock antibody). Cells are incubated at 37° C. for 30 min. in a humidified environment. Wells are washed three times with PBS(+Ca,Mg) +0.5% BSA. 20 μl of diluted ExtrAvidin-Alkaline Phosphatase (1:5,000 dilution, referred to herein as the working dilution) are added to each well and incubated at 37° C. for 30 min. Wells are washed three times with PBS(+Ca,Mg)+0.5% BSA. Dissolve 1 tablet of p-Nitrophenol Phosphate pNPP per 5 ml of glycine buffer (pH 10.4). 100 μl of pNPP substrate in glycine buffer is added to each test well. Standard wells in triplicate are prepared from the working dilution of the ExtrAvidin-Alkaline Phosphotase in glycine buffer: 1:5,000 (10⁰)>10^{-0.5}>10⁻¹>10^{-1.5} μl of each dilution is added to triplicate wells and the resulting AP content in each well is 5.50 ng, 1.74 ng, 0.55 ng, 0.18 ng. 100 μl of pNNP reagent is then added to each of the standard wells. The plate is incubated at 37° C. for 4 h. A volume of 50 μl of 3M NaOH is added to all wells. The plate is read on a plate reader at 405 nm using the background subtraction option on blank wells filled with glycine buffer only. Additionally, the template is set up to indicate the concentration of AP-conjugate in each standard well [5.50 ng; 1.74 ng; 0.55 ng; 0.18 ng]. Results are indicated as amount of bound AP-conjugate in each sample.

### Example 44

### Alamar Blue Endothelial Cells Proliferation Assay

[1289] This assay may be used to quantitatively determine protein mediated inhibition of bFGF-induced proliferation of Bovine Lymphatic Endothelial Cells (LECs), Bovine Aortic Endothelial Cells (BAECs) or Human Microvascular Uterine Myometrial Cells (UTMECs). This assay incorporates a fluorometric growth indicator based on detection of metabolic activity. A standard Alamar Blue Proliferation Assay is prepared in EGM-2MV with 10 ng/ml of bFGF added as a source of endothelial cell stimulation. This assay may be used with a variety of endothelial cells with slight changes in growth medium and cell concentration. Dilutions of the protein batches to be tested are diluted as appropriate. Serum-free medium (GIBCO SFM) without bFGF is used as a non-stimulated control and Angiostatin or TSP-1 are included as a known inhibitory controls.

[1290] Briefly, LEC, BAECs or UTMECs are seeded in growth media at a density of 5000 to 2000 cells/well in a 96 well plate and placed at 37 degrees C overnight. After the overnight incubation of the cells, the growth media is removed and replaced with GIBCO EC-SFM. The cells are treated with the appropriate dilutions of the protein of interest or control protein sample(s) (prepared in SFM) in triplicate wells with additional bFGF to a concentration of 10 ng/ml. Once the cells have been treated with the samples, the plate(s) is/are placed back in the 37° C. incubator for three days. After three days 10 ml of stock alamar blue (Biosource Cat# DAL1100) is added to each well and the plate(s) is/are placed back in the 37° C. incubator for four hours. The plate(s) are then read at 530 nm excitation and 590 nm emission using the CytoFluor fluorescence reader. Direct output is recorded in relative fluorescence units.

[1291] Alamar blue is an oxidation-reduction indicator that both fluoresces and changes color in response to chemical reduction of growth medium resulting from cell growth. As cells grow in culture, innate metabolic activity results in a chemical reduction of the immediate surrounding environment. Reduction related to growth causes the indicator to change from oxidized (non-fluorescent blue) form to reduced (fluorescent red) form (i.e., stimulated proliferation will produce a stronger signal and inhibited proliferation will produce a weaker signal and the total signal is proportional to the total number of cells as well as their metabolic activity). The background level of activity is observed with the starvation medium alone. This is compared to the output observed from the positive control samples (bFGF in growth medium) and protein dilutions.

### Example 45

### Detection of Inhibition of a Mixed Lymphocyte Reaction

[1292] This assay can be used to detect and evaluate inhibition of a Mixed Lymphocyte Reaction (MLR) by gene products (e.g., isolated polypeptides). Inhibition of a MLR may be due to a direct effect on cell proliferation and viability, modulation of costimulatory molecules on interacting cells, modulation of adhesiveness between lymphocytes and accessory cells, or modulation of cytokine production by accessory cells. Multiple cells may be targeted by these polypeptides since the peripheral blood mononuclear fraction used in this assay includes T, B and natural killer lymphocytes, as well as monocytes and dendritic cells.

[1293] Polypeptides of interest found to inhibit the MLR may find application in diseases associated with lymphocyte and monocyte activation or proliferation. These include, but are not limited to, diseases such as asthma, arthritis, diabetes, inflammatory skin conditions, psoriasis, eczema, systemic lupus erythematosus, multiple sclerosis, glomerulonephritis, inflammatory bowel disease, crohn's disease, ulcerative colitis, arteriosclerosis, cirrhosis, graft vs. host disease, host vs. graft disease, hepatitis, leukemia and lymphoma.

[1294] Briefly, PBMCs from human donors are purified by density gradient centrifugation using Lymphocyte Separation Medium (LSM®, density 1.0770 g/ml, Organon Teknika Corporation, West Chester, PA). PBMCs from two donors are adjusted to 2×10⁶ cells/ml in RPMI-1640 (Life Technologies, Grand Island, N.Y.) supplemented with 10% FCS and 2 mM glutamine. PBMCs from a third donor is adjusted to 2×10⁵ cells/ml. Fifty microliters of PBMCs from each donor is added to wells of a 96-well round bottom microtiter plate. Dilutions of test materials (50 μl) is added in triplicate to microtiter wells. Test samples (of the protein of interest) are added for final dilution of 1:4; rhuIL-2 (R&D Systems, Minneapolis, Minn., catalog number 202-IL) is added to a final concentration of 1 μg/ml; anti-CD4 mAb (R&D Systems, clone 34930.11, catalog number MAB379) is added to a final concentration of 10 μg/ml. Cells are cultured for 7-8 days at 37° C. in 5% CO₂, and 1 μC of [³H] thymidine is added to wells for the last 16 hrs of culture. Cells are harvested and thymidine incorporation determined using a Packard TopCount. Data is expressed as the mean and standard deviation of triplicate determinations.

[1295] Samples of the protein of interest are screened in separate experiments and compared to the negative control treatment, anti-CD4 mAb, which inhibits proliferation of lymphocytes and the positive control treatment, IL-2 (either as recombinant material or supernatant), which enhances proliferation of lymphocytes.

[1296] One skilled in the art could easily modify the exemplified studies to test the activity of polynucleotides (e.g., gene therapy), antibodies, agonists, and/or antagonists and fragments and variants thereof.

### Example 46

### Assays for Protease Activity

[1297] The following assay may be used to assess protease activity of the polypeptides of the invention.

[1298] Gelatin and casein zymography are performed essentially as described (Heusen et al., Anal. Biochem., 102:196-202 (1980); Wilson et al., Journal of Urology, 149:653-658 (1993)). Samples are run on 10% polyacryamide/0.1% SDS gels containing 1% gelain orcasein, soaked in 2.5% triton at room temperature for 1 hour, and in 0.1M glycine, pH 8.3 at 37° C. 5 to 16 hours. After staining in amido black areas of proteolysis apear as clear areas agains the blue-black background. Trypsin (Sigma T8642) is used as a positive control.

[1299] Protease activity is also determined by monitoring the cleavage of n-a-benzoyl-L-arginine ethyl ester (BAEE) (Sigma B-4500. Reactions are set up in (25 mMNaPO₄, 1 mM EDTA, and 1 mM BAEE), pH 7.5. Samples are added and the change in adsorbance at 260 nm is monitored on the Beckman DU-6 spectrophotometer in the time-drive mode. Trypsin is used as a positive control.

[1300] Additional assays based upon the release of acid-soluble peptides from casein or hemoglobin measured as adsorbance at 280 nm or colorimetrically using the Folin method are performed as described in Bergmeyer, et al., Methods of Enzymatic Analysis, 5 (1984). Other assays involve the solubilization of chromogenic substrates (Ward, Applied Science, 251-317 (1983)).

### Example 47

### Identifying Serine Protease Substrate Specificity

[1301] Methods known in the art or described herein may be used to determine the substrate specificity of the polypeptides of the present invention having serine protease activity. A preferred method of determining substrate specificity is by the use of positional scanning synthetic combinatorial libraries as described in GB 2 324 529 (incorporated herein in its entirety).

### Example 48

### Ligand Binding Assays

[1302] The following assay may be used to assess ligand binding activity of the polypeptides of the invention.

[1303] Ligand binding assays provide a direct method for ascertaining receptor pharmacology and are adaptable to a high throughput format. The purified ligand for a polypeptide is radiolabeled to high specific activity (50-2000 Ci/mmol) for binding studies. A determination is then made that the process of radiolabeling does not diminish the activity of the ligand towards its polypeptide. Assay conditions for buffers, ions, pH and other modulators such as nucleotides are optimized to establish a workable signal to noise ratio for both membrane and whole cell polypeptide sources. For these assays, specific polypeptide binding is defined as total associated radioactivity minus the radioactivity measured in the presence of an excess of unlabeled competing ligand. Where possible, more than one competing ligand is used to define residual nonspecific binding.

### Example 49

### Functional Assay in Xenopus Oocytes

[1304] Capped RNA transcripts from linearized plasmid templates encoding the polypeptides of the invention are synthesized in vitro with RNA polymerases in accordance with standard procedures. In vitro transcripts are suspended in water at a final concentration of 0.2 mg/mi. Ovarian lobes are removed from adult female toads, Stage V defolliculated oocytes are obtained, and RNA transcripts (10 ng/oocytc) are injected in a 50 nl bolus using a microinjection apparatus. Two electrode voltage clamps are used to measure the currents from individual Xenopus oocytes in response polypeptides and polypeptide agonist exposure. Recordings are made in Ca2+ free Barth's medium at room temperature. The Xenopus system can be used to screen known ligands and tissue/cell extracts for activating ligands.

### Example 50

### Microphysiometric Assays

[1305] Activation of a wide variety of secondary messenger systems results in extrusion of small amounts of acid from a cell. The acid formed is largely as a result of the increased metabolic activity required to fuel the intracellular signaling process. The pH changes in the media surrounding the cell are very small but are detectable by the CYTOSENSOR microphysiometer (Molecular Devices Ltd., Menlo Park, Calif.). The CYTOSENSOR is thus capable of detecting the activation of polypeptide which is coupled to an energy utilizing intracellular signaling pathway.

### Example 51

### Extract/Cell Supernatant Screening

[1306] A large number of mammalian receptors exist for which there remains, as yet, no cognate activating ligand (agonist). Thus, active ligands for these receptors may not be included within the ligands banks as identified to date. Accordingly, the polypeptides of the invention can also be functionally screened (using calcium, cAMP, microphysiometer, oocyte electrophysiology, etc., functional screens) against tissue extracts to identify its natural ligands. Extracts that produce positive functional responses can be sequentially subfractionated until an activating ligand is isolated and identified.

### Example 52

### Calcium and cAMP Functional Assays

[1307] Seven transmembrane receptors which are expressed in HEK 293 cells have been shown to be coupled functionally to activation of PLC and calcium mobilization and/or cAMP stimulation or inhibition. Basal calcium levels in the HEK 293 cells in receptor-transfected or vector control cells were observed to be in the normal, 100 nM to 200 nM, range. HEK 293 cells expressing recombinant receptors are loaded with fura 2 and in a single day >150 selected ligands or tissue/cell extracts are evaluated for agonist induced calcium mobilization. Similarly, HEK 293 cells expressing recombinant receptors are evaluated for the stimulation or inhibition of cAMP production using standard cAMP quantitation assays. Agonists presenting a calcium transient or cAMP fluctuation are tested in vector control cells to determine if the response is unique to the transfected cells expressing receptor.

### Example 53

### ATP-binding Assay

[1308] The following assay may be used to assess ATP-binding activity of polypeptides of the invention.

[1309] ATP-binding activity of the polypeptides of the invention may be detected using the ATP-binding assay described in U.S. Pat. No. 5,858,719, which is herein incorporated by reference in its entirety. Briefly, ATP-binding to polypeptides of the invention is measured via photoaffinity labeling with 8-azido-ATP in a competition assay. Reaction mixtures containing 1 mg/ml of the ABC transport protein of the present invention are incubated with varying concentrations of ATP, or the non-hydrolyzable ATP analog adenyl-5′-imidodiphosphate for 10 minutes at 4° C. A mixture of 8-azido-ATP (Sigma Chem. Corp., St. Louis, Mo.) plus 8-azido-ATP (³²P-ATP) (5 mCi/μmol, ICN, Irvine Calif.) is added to a final concentration of 100 μM and 0.5 ml aliquots are placed in the wells of a porcelain spot plate on ice. The plate is irradiated using a short wave 254 nm UV lamp at a distance of 2.5 cm from the plate for two one-minute intervals with a one-minute cooling interval in between. The reaction is stopped by addition of dithiothreitol to a final concentration of 2 mM. The incubations are subjected to SDS-PAGE electrophoresis, dried, and autoradiographed. Protein bands corresponding to the particular polypeptides of the invention are excised, and the radioactivity quantified. A decrease in radioactivity with increasing ATP or adenly-5′-imidodiphosphate provides a measure of ATP affinity to the polypeptides.

### Example 54

### Small Molecule Screening

[1310] This invention is particularly useful for screening therapeutic compounds by using the polypeptides of the invention, or binding fragments thereof, in any of a variety of drug screening techniques. The polypeptide or fragment employed in such a test may be affixed to a solid support, expressed on a cell surface, free in solution, or located intracellularly. One method of drug screening utilizes eukaryotic or prokaryotic host cells which are stably transformed with recombinant nucleic acids expressing the polypeptide or fragment. Drugs are screened against such transformed cells in competitive binding assays. One may measure, for example, the formulation of complexes between the agent being tested and polypeptide of the invention.

[1311] Thus, the present invention provides methods of screening for drugs or any other agents which affect activities mediated by the polypeptides of the invention. These methods comprise contacting such an agent with a polypeptide of the invention or fragment thereof and assaying for the presence of a complex between the agent and the polypeptide or fragment thereof, by methods well known in the art. In such a competitive binding assay, the agents to screen are typically labeled. Following incubation, free agent is separated from that present in bound form, and the amount of free or uncomplexed label is a measure of the ability of a particular agent to bind to the polypeptides of the invention.

[1312] Another technique for drug screening provides high throughput screening for compounds having suitable binding affinity to the polypeptides of the invention, and is described in great detail in European Patent Application 84/03564, published on Sep. 13, 1984, which is herein incorporated by reference in its entirety. Briefly stated, large numbers of different small molecule test compounds are synthesized on a solid substrate, such as plastic pins or some other surface. The test compounds are reacted with polypeptides of the invention and washed. Bound polypeptides are then detected by methods well known in the art. Purified polypeptides are coated directly onto plates for use in the aforementioned drug screening techniques. In addition, non-neutralizing antibodies may be used to capture the peptide and immobilize it on the solid support.

[1313] This invention also contemplates the use of competitive drug screening assays in which neutralizing antibodies capable of binding polypeptides of the invention specifically compete with a test compound for binding to the polypeptides or fragments thereof. In this manner, the antibodies are used to detect the presence of any peptide which shares one or more antigenic epitopes with a polypeptide of the invention.

### Example 55

### Phosphorylation Assay

[1314] In order to assay for phosphorylation activity of the polypeptides of the invention, a phosphorylation assay as described in U.S. Pat. No. 5,958,405 (which is herein incorporated by reference) is utilized. Briefly, phosphorylation activity may be measured by phosphorylation of a protein substrate using gamma-labeled ³²P-ATP and quantitation of the incorporated radioactivity using a gamma radioisotope counter. The polypeptides of the invention are incubated with the protein substrate, ³²P-ATP, and a kinase buffer. The ³²P incorporated into the substrate is then separated from free ³²P-ATP by electrophoresis, and the incorporated ³²P is counted and compared to a negative control. Radioactivity counts above the negative control are indicative of phosphorylation activity of the polypeptides of the invention.

### Example 56

### Detection of Phosphorylation Activity (Activation) of the Polypeptides of the Invention in the Presence of Polypeptide Ligands

[1315] Methods known in the art or described herein may be used to determine the phosphorylation activity of the polypeptides of the invention. A preferred method of determining phosphorylation activity is by the use of the tyrosine phosphorylation assay as described in U.S. Pat. No. 5,817,471 (incorporated herein by reference).

### Example 57

### Identification of Signal Transduction Proteins that Interact With Polypeptides of the Present Invention

[1316] The purified polypeptides of the invention are research tools for the identification, characterization and purification of additional signal transduction pathway proteins or receptor proteins. Briefly, labeled polypeptides of the invention are useful as reagents for the purification of molecules with which it interacts. In one embodiment of affinity purification, polypeptides of the invention are covalently coupled to a chromatography column. Cell-free extract derived from putative target cells, such as carcinoma tissues, is passed over the column, and molecules with appropriate affinity bind to the polypeptides of the invention. The protein complex is recovered from the column, dissociated, and the recovered molecule subjected to N-terminal protein sequencing. This amino acid sequence is then used to identify the captured molecule or to design degenerate oligonucleotide probes for cloning the relevant gene from an appropriate cDNA library.

### Example 58

### IL-6 Bioassay

[1317] To test the proliferative effects of the polypeptides of the invention, the IL-6 Bioassay as described by Marz et al. is utilized (Proc. Natl. Acad. Sci., U.S.A., 95:3251-56 (1998), which is herein incorporated by reference). Briefly, IL-6 dependent B9 murine cells are washed three times in IL-6 free medium and plated at a concentration of 5,000 cells per well in 50 μl, and 50 μl of the IL-6-like polypeptide is added. After 68 hrs. at 37° C., the number of viable cells is measured by adding the tetrazolium salt thiazolyl blue (MTT) and incubating for a further 4 hrs. at 37° C. B9 cells are lysed by SDS and optical density is measured at 570 nm. Controls containing IL-6 (positive) and no cytokine (negative) are utilized. Enhanced proliferation in the test sample(s) relative to the negative control is indicative of proliferative effects mediated by polypeptides of the invention.

### Example 59

### Support of Chicken Embryo Neuron Survival

[1318] To test whether sympathetic neuronal cell viability is supported by polypeptides of the invention, the chicken embryo neuronal survival assay of Senaldi et al is utilized (Proc. Natl. Acad. Sci., U.S.A., 96:11458-63 (1998), which is herein incorporated by reference). Briefly, motor and sympathetic neurons are isolated from chicken embryos, resuspended in L15 medium (with 10% FCS, glucose, sodium selenite, progesterone, conalbumin, putrescine, and insulin; Life Technologies, Rockville, Md.) and Dulbecco's modified Eagles medium [with 10% FCS, glutamine, penicillin, and 25 mM Hepes buffer (pH 7.2); Life Technologies, Rockville, Md.], respectively, and incubated at 37° C. in 5% CO₂ in the presence of different concentrations of the purified IL-6-like polypeptide, as well as a negative control lacking any cytokine. After 3 days, neuron survival is determined by evaluation of cellular morphology, and through the use of the colorimetric assay of Mosmann (Mosmann, T., J. Immunol. Methods, 65:55-63 (1983)). Enhanced neuronal cell viability as compared to the controls lacking cytokine is indicative of the ability of the inventive purified IL-6-like polypeptide(s) to enhance the survival of neuronal cells.

### Example 60

### Assay for Phosphatase Activity

[1319] The following assay may be used to assess serine/threonine phosphatase (PTPase) activity of the polypeptides of the invention.

[1320] In order to assay for serine/threonine phosphatase (PTPase) activity, assays can be utilized which are widely known to those skilled in the art. For example, the serine/threonine phosphatase (PSPase) activity is measured using a PSPase assay kit from New England Biolabs, Inc. Myelin basic protein (MyBP), a substrate for PSPase, is phosphorylated on serine and threonine residues with cAMP-dependent Protein Kinase in the presence of [³²P]ATP. Protein serine/threonine phosphatase activity is then determined by measuring the release of inorganic phosphate from 32P-labeled MyBP.

### Example 61

### Interaction of Serine/Threonine Phosphatases with Other Proteins

[1321] The polypeptides of the invention with serine/threonine phosphatase activity as determined in Example 60 are research tools for the identification, characterization and purification of additional interacting proteins or receptor proteins, or other signal transduction pathway proteins. Briefly, labeled polypeptide(s) of the invention is useful as a reagent for the purification of molecules with which it interacts. In one embodiment of affinity purification, polypeptide of the invention is covalently coupled to a chromatography column. Cell-free extract derived from putative target cells, such as neural or liver cells, is passed over the column, and molecules with appropriate affinity bind to the polypeptides of the invention. The polypeptides of the invention -complex is recovered from the column, dissociated, and the recovered molecule subjected to N-terminal protein sequencing. This amino acid sequence is then used to identify the captured molecule or to design degenerate oligonucleotide probes for cloning the relevant gene from an appropriate cDNA library.

### Example 62

### Assaying for Heparanase Activity

[1322] In order to assay for heparanase activity of the polypeptides of the invention, the heparanase assay described by Vlodavsky et al is utilized (Vlodavsky, I., et al., Nat. Med., 5:793-802 (1999)). Briefly, cell lysates, conditioned media or intact cells (1×10⁶ cells per 35-mm dish) are incubated for 18 hrs at 37° C., pH 6.2-6.6, with ³⁵S-labeled ECM or soluble ECM derived peak I proteoglycans. The incubation medium is centrifuged and the supernatant is analyzed by gel filtration on a Sepharose CL-6B column (0.9×30 cm). Fractions are eluted with PBS and their radioactivity is measured. Degradation fragments of heparan sulfate side chains are eluted from Sepharose 6B at 0.5<Kₐᵥ<0.8 (peak II). Each experiment is done at least three times. Degradation fragments corresponding to “peak II,” as described by Vlodavsky et al., is indicative of the activity of the polypeptides of the invention in cleaving heparan sulfate.

### Example 63

### Immobilization of Biomolecules

[1323] This example provides a method for the stabilization of polypeptides of the invention in non-host cell lipid bilayer constucts (see, e.g., Bieri et al., Nature Biotech 17:1105-1108 (1999), hereby incorporated by reference in its entirety herein) which can be adapted for the study of polypeptides of the invention in the various functional assays described above. Briefly, carbohydrate-specific chemistry for biotinylation is used to confine a biotin tag to the extracellular domain of the polypeptides of the invention, thus allowing uniform orientation upon immobilization. A 50 uM solution of polypeptides of the invention in washed membranes is incubated with 20 mM NaIO4 and 1.5 mg/ml (4 mM) BACH or 2 mg/ml (7.5 mM) biotin-hydrazide for 1 hr at room temperature (reaction volume, 150 ul). Then the sample is dialyzed (Pierce Slidealizer Cassett, 10 kDa cutoff; Pierce Chemical Co., Rockford Ill.) at 4 C first for 5 h, exchanging the buffer after each hour, and finally for 12 h against 500 ml buffer R (0.15 M NaCl, 1 mM MgCl2, 10 mM sodium phosphate, pH 7). Just before addition into a cuvette, the sample is diluted 1:5 in buffer ROG50 (Buffer R supplemented with 50 mM octylglucoside).

### Example 64

### TAQMAN

[1324] Quantitative PCR (QPCR). Total RNA from cells in culture are extracted by Trizol separation as recommended by the supplier (LifeTechnologies). (Total RNA is treated with DNase I (Life Technologies) to remove any contaminating genomic DNA before reverse transcription.) Total RNA (50 ng) is used in a one-step, 50 ul, RT-QPCR, consisting of Taqman Buffer A (Perkin-Elmer; 50 mM KCl/10 mM Tris, pH 8.3), 5.5 mM MgCl₂, 240 μM each dNTP, 0.4 units RNase inhibitor(Promega), 8%glycerol, 0.012% Tween-20, 0.05% gelatin, 0.3 uM primers, 0.1 uM probe, 0.025 units Amplitaq Gold (Perkin-Elmer) and 2.5 units Superscript II reverse transcriptase (Life Technologies). As a control for genomic contamination, parallel reactions are setup without reverse transcriptase. The relative abundance of (unknown) and 18S RNAs are assessed by using the Applied Biosystems Prism 7700 Sequence Detection System (Livak, K. J., Flood, S. J., Marmaro, J., Giusti, W. & Deetz, K. (1995) PCR Methods Appl. 4, 357-362). Reactions are carried out at 48° C. for 30 min, 95° C. for 10 min, followed by 40 cycles of 95° C. for 15 s, 60° C. for 1 min. Reactions are performed in triplicate.

[1325] Primers (f & r) and FRET probes sets are designed using Primer Express Software (Perkin-Elmer). Probes are labeled at the 5′-end with the reporter dye 6-FAM and on the 3′-end with the quencher dye TAMRA (Biosource International, Camarillo, Calif. or Perkin-Elmer).

### Example 65

### Assays for Metalloproteinase Activity

[1326] Metalloproteinases (EC 3.4.24.-) are peptide hydrolases which use metal ions, such as Zn²⁺, as the catalytic mechanism. Metalloproteinase activity of polypeptides of the present invention can be assayed according to the following methods.

[1327] Proteolysis of Alpha-2-macroglobulin

[1328] To confirm protease activity, purified polypeptides of the invention are mixed with the substrate alpha-2-macroglobulin (0.2 unit/ml; Boehringer Mannheim, Germany) in lx assay buffer (50 mM HEPES, pH 7.5, 0.2 M NaCl, 10 mM CaCl₂, 25 μM ZnCl₂ and 0.05% Brij-35) and incubated at 37° C. for 1-5 days. Trypsin is used as positive control. Negative controls contain only alpha-2-macroglobulin in assay buffer. The samples are collected and boiled in SDS-PAGE sample buffer containing 5% 2-mercaptoethanol for 5-min, then loaded onto 8% SDS-polyacrylamide gel. After electrophoresis the proteins are visualized by silver staining. Proteolysis is evident by the appearance of lower molecular weight bands as compared to the negative control.

[1329] Inhibition of Alpha-2-macroglobulin Proteolysis by Inhibitors of Metalloproteinases

[1330] Known metalloproteinase inhibitors (metal chelators (EDTA, EGTA, AND HgCl₂), peptide metalloproteinase inhibitors (TIMP-1 and TIMP-2), and commercial small molecule MMP inhibitors) are used to characterize the proteolytic activity of polypeptides of the invention. The three synthetic MMP inhibitors used are: MMP inhibitor I, [IC₅₀=1.0 μM against MMP-1 and MMP-8; IC₅₀=30 μM against MMP-9; IC₅₀=150 μM against MMP-3]; MMP-3 (stromelysin-1) inhibitor I [IC₅₀=5 μM against MMP-3], and MMP-3 inhibitor II [Kᵢ=130 nM against MMP-3]; inhibitors available through Calbiochem, catalog@444250, 444218, and 444225, respectively). Briefly, different concentrations of the small molecule MMP inhibitors are mixed with purified polypeptides of the invention (50 μg/ml) in 22.9 μl of 1× HEPES buffer (50 mM HEPES, pH 7.5, 0.2 M NaCl, 10 mM CaCl₂, 25 μM ZnCl₂ and 0.05%Brij-35) and incubated at room temperature (24° C.) for 2-hr, then 7.1 μl of substrate alpha-2-macroglobulin (0.2 unit/ml) is added and incubated at 37° C. for 20-hr. The reactions are stopped by adding 4× sample buffer and boiled immediately for 5 minutes. After SDS-PAGE, the protein bands are visualized by silver stain.

[1331] Synthetic Fluorogenic Peptide Substrates Cleavage Assay

[1332] The substrate specificity for polypeptides of the invention with demonstrated metalloproteinase activity can be determined using synthetic fluorogenic peptide substrates (purchased from BACHEM Bioscience Inc). Test substrates include, M-1985, M-2225, M-2105, M-2110, and M-2255. The first four are MMP substrates and the last one is a substrate of tumor necrosis factor-α (TNF-α) converting enzyme (TACE). All the substrates are prepared in 1:1 dimethyl sulfoxide (DMSO) and water. The stock solutions are 50-500 μM. Fluorescent assays are performed by using a Perkin Elmer LS 50B luminescence spectrometer equipped with a constant temperature water bath. The excitation λ is 328 nm and the emission λ is 393 nm. Briefly, the assay is carried out by incubating 176 μl 1× HEPES buffer (0.2 M NaCl, 10 mM CaCl₂, 0.05% Brij-35 and 50 mM HEPES, pH 7.5) with 4 μl of substrate solution (50 μM) at 25° C. for 15 minutes, and then adding 20 μl of a purified polypeptide of the invention into the assay cuvett. The final concentration of substrate is 1 μM. Initial hydrolysis rates are monitored for 30-min.

### Example 66

### Characterization of the cDNA Contained in a Deposited Plasmid

[1333] The size of the cDNA insert contained in a deposited plasmid may be routinely determined using techniques known in the art, such as PCR amplification using synthetic primers hybridizable to the ₃′ and 5′ ends of the cDNA sequence. For example, two primers of 17-30 nucleotides derived from each end of the cDNA (i.e., hybridizable to the absolute 5′ nucleotide or the 3′ nucleotide end of the sequence of SEQ ID NO:X, respectively) are synthesized and used to amplify the cDNA using the deposited cDNA plasmid as a template. The polymerase chain reaction is carried out under routine conditions, for instance, in 25 ul of reaction mixture with 0.5 ug of the above cDNA template. A convenient reaction mixture is 1.5-5 mM MgCl₂, 0.01% (w/v) gelatin, 20 uM each of dATP, dCTP, dGTP, dTTP, 25 pmol of each primer and 0.25 Unit of Taq polymerase. Thirty five cycles of PCR (denaturation at 94 degree C for 1 min; annealing at 55 degree C for 1 min; elongation at 72 degree C for 1 min) are performed with a Perkin-Elmer Cetus automated thermal cycler. The amplified product is analyzed by agarose gel electrophoresis. The PCR product is verified to be the selected sequence by subcloning and sequencing the DNA product.

[1334] Use of the above methodologies and/or other methodologies known in the art generates fragments from the clone corresponding to the approximate fragments described in Table 8, below. Accordingly, Table 8 provides a physical characterization of certain clones encompassed by the invention. The first column provides the unique clone identifier, “Clone ID NO:Z”, for cDNA clones of the invention, as described in Table 1A. The second column provides the approximate size of the cDNA insert contained in the corresponding cDNA clone.

TABLE 8

| | cDNA |
|---|---|
| Clone ID | Insert |
| NO:Z | Size: |
| HNHFR39 | 700 |
| HFATE17 | 700 |
| HMSGL27 | 1600 |
| HKIXB77 | 1200 |
| HBJGT92 | 1900 |
| HMUBI13 | 1300 |
| HPCAO89 | 1500 |
| HE2KN09 | 1400 |
| HCEPY32 | 2700 |
| HTOCG37 | 1400 |
| HTEOF80 | 1700 |
| HSLDP32 | 600 |
| HSSKD85 | 1100 |
| HCRMV17 | 1300 |
| HMKBA52 | 700 |
| HLCMP75 | 1500 |
| HEGAZ61 | 2400 |
| HPJEQ52 | 2000 |
| HFIZB56 | 1900 |
| HUKEP18 | 900 |
| HTSHM38 | 2300 |
| HLHCR16 | 3800 |
| HMEIS32 | 1700 |
| HOGDR01 | 1500 |
| HBMXS88 | 1600 |
| HE8UL90 | 2700 |
| HWHGF95 | 1400 |
| HNKAZ51 | 900 |
| HFKKE19 | 700 |
| HFKHD91 | 1400 |
| HUSXE73 | 1300 |
| HNFCS26 | 1700 |
| HAPOI67 | 2300 |
| HE8NI05 | 2900 |

[1335] It will be clear that the invention may be practiced otherwise than as particularly described in the foregoing description and examples. Numerous modifications and variations of the present invention are possible in light of the above teachings and, therefore, are within the scope of the appended claims.

[1336] The entire disclosure of each document cited (including patents, patent applications, journal articles, abstracts, laboratory manuals, books, or other disclosures) in the Background of the Invention, Detailed Description, and Examples is hereby incorporated herein by reference. In addition, the CD-R copy of the sequence listing submitted herewith and the corresponding computer readable form are both incorporated herein by reference in their entireties. The specification and sequence listing of each of the following U.S. applications are herein incorporated by reference in their entirety: Application No. 60/179,065, filed on Jan. 31, 2000; Application No. 60/180,628, filed on Feb. 4, 2000; Application No. 60/214,886, filed on Jun. 28, 2000; Application No. 60/217,487, filed on Jul. 11, 2000; Application No. 60/225,758, filed on Aug. 14, 2000; Application No. 60/220,963, filed on Jul. 26, 2000; Application No. 60/217,496, filed on Jul. 11, 2000; Application No. 60/225,447, filed on Aug. 14, 2000; Application No. 60/218,290, filed on Jul. 14, 2000; Application No. 60/225,757, filed on Aug. 14, 2000; Application No. 60/226,868, filed on Aug. 22, 2000; Application No. 60/216,647, filed on Jul. 7, 2000; Application No. 60/225,267, filed on Aug. 14, 2000; Application No. 60/216,880, filed on Jul. 7, 2000; Application No. 60/225,270, filed on Aug. 14, 2000; Application No. 60/251,869, fied on Dec. 8, 2000; Application No. 60/235,834, filed on Sep. 27, 2000; Application No. 60/234,274, filed on Sep. 21, 2000; Application No. 60/234,223, filed on Sep. 21, 2000; Application No. 60/228,924, filed on Aug. 30, 2000; Application No. 60/224,518, filed on Aug. 14, 2000; Application No. 60/236,369, filed on Sep. 29, 2000; Application No. 60/224,519, filed on Aug. 14, 2000; Application No. 60/220,964, filed on Jul. 26, 2000; Application No. 60/241,809, filed on Oct. 20, 2000; Application No. 60/249,299, filed on Nov. 17, 2000; Application No. 60/236,327, filed on Sep. 29, 2000; Application No. 60/241,785, filed on Oct. 20, 2000; Application No. 60/244,617, filed on Nov. 1, 2000; Application No. 60/225,268, filed on Aug. 14, 2000; Application No. 60/236,368, filed on Sep. 29, 2000; Application No. 60/251,856, filed on Dec. 8, 2000; Application No. 60/251,868, filed on Dec. 8, 2000; Application No. 60/229,344, filed on Sep. 1, 2000; Application No. 60/234,997, filed on Sep. 25, 2000; Application No. 60/229,343, filed on Sep. 1, 2000; Application No. 60/229,345, filed on Sep. 1, 2000; Application No. 60/229,287, filed on Sep. 1, 2000; Application No. 60/229,513, filed on Sep. 5, 2000; Application No. 60/231,413, filed on Sep. 8, 2000; Application No. 60/229,509, filed on Sep. 5, 2000; Application No. 60/236,367, filed on Sep. 29, 2000; Application No. 60/237,039, filed on Oct. 2, 2000; Application No. 60/237,038, filed on Oct. 2, 2000; Application No. 60/236,370, filed on Sep. 29, 2000; Application No. 60/236,802, filed on Oct. 2, 2000; Application No. 60/237,037, filed on Oct. 2, 2000; Application No. 60/237,040, filed on Oct. 2, 2000; Application No. 60/240,960, filed on Oct. 20, 2000; Application No. 60/239,935, filed on Oct. 13, 2000; Application No. 60/239,937, filed on Oct. 13, 2000; Application No. 60/241,787, filed on Oct. 20, 2000; Application No. 60/246,474, filed on Nov. 8, 2000; Application No. 60/246,532, filed on Nov. 8, 2000; Application No. 60/249,216, filed on Nov. 17, 2000; Application No. 60/249,210, filed on Nov. 17, 2000; Application No. 60/226,681, filed on Aug. 22, 2000; Application No. 60/225,759, filed on Aug. 14, 2000; Application No. 60/225,213, filed on Aug. 14, 2000; Application No. 60/227,182, filed on Aug. 22, 2000; Application No. 60/225,214, filed on Aug. 14, 2000; Application No. 60/235,836, filed on Sep. 27, 2000; Application No. 60/230,438, filed on Sep. 6, 2000; Application No. 60/215,135, filed on Jun. 30, 2000; Application No. 60/225,266, filed on Aug. 14, 2000; Application No. 60/249,218, filed on Nov. 17, 2000; Application No. 60/249,208, filed on Nov. 17, 2000; Application No. 60/249,213, filed on Nov. 17, 2000; Application No. 60/249,212, filed on Nov. 17, 2000; Application No. 60/249,207, filed on Nov. 17, 2000; Application No. 60/249,245, filed on Nov. 17, 2000; Application No. 60/249,244, filed on Nov. 17, 2000; Application No. 60/249,217, filed on Nov. 17, 2000; Application No. 60/249,211, filed on Nov. 17, 2000; Application No. 60/249,215, filed on Nov. 17, 2000; Application No. 60/249,264, filed on Nov. 17, 2000; Application No. 60/249,214, filed on Nov. 17, 2000; Application No. 60/249,297, filed on Nov. 17, 2000; Application No. 60/232,400, filed on Sep. 14, 2000; Application No. 60/231,242, filed on Sep. 8, 2000; Application No. 60/232,081, filed on Sep. 8, 2000; Application No. 60/232,080, filed on Sep. 8, 2000; Application No. 60/231,414, filed on Sep. 8, 2000; Application No. 60/231,244, filed on Sep. 8, 2000; Application No. 60/233,064, filed on Sep. 14, 2000; Application No. 60/233,063, filed on Sep. 14, 2000; Application No. 60/232,397, filed on Sep. 14, 2000; Application No. 60/232,399, filed on Sep. 14, 2000; Application No. 60/232,401, filed on Sep. 14, 2000; Application No. 60/241,808, filed on Oct. 20, 2000; Application No. 60/241,826, filed on Oct. 20, 2000; Application No. 60/241,786, filed on Oct. 20, 2000; Application No. 60/241,221, filed on Oct. 20, 2000; Application No. 60/246,475, filed on Nov. 08, 2000; Application No. 60/231,243, filed on Sep. 8, 2000; Application No. 60/233,065, filed on Sep. 14, 2000; Application No. 60/232,398, filed on Sep. 14, 2000; Application No. 60/234,998, filed on Sep. 25, 2000; Application No. 60/246,477, filed on Nov. 8, 2000; Application No. 60/246,528, filed on Nov. 8, 2000; Application No. 60/246,525, filed on Nov. 8, 2000; Application No. 60/246,476, filed on Nov. 8, 2000; Application No. 60/246,526, filed on Nov. 08, 2000; Application No. PT172, filed on Nov. 17, 2000; Application No. 60/246,527, filed on Nov. 08, 2000; Application No. 60/246,523, filed on Nov. 8, 2000; Application No. 60/246,524, filed on Nov. 8, 2000; Application No. 60/246,478, filed on Nov. 8, 2000; Application No. 60/246,609, filed on Nov. 8, 2000; Application No. 60/246,613, filed on Nov. 8, 2000; Application No. 60/249,300, filed on Nov. 17, 2000; Application No. 60/249,265, filed on Nov. 17, 2000; Application No. 60/246,610, filed on Nov. 8, 2000; Application No. 60/246,611, filed on Nov. 8, 2000; Application No. 60/230,437, filed on Sep. 6, 2000; Application No. 60/251,990, filed on Dec. 8, 2000; Application No. 60/251,988, filed on Dec. 5, 2000; Application No. 60/251,030, filed on Dec. 5, 2000; Application No. 60/251,479, filed on Dec. 6, 2000; Application No. PJOO5, filed on Dec. 5, 2000; Application No. PJOO6, filed on Dec. 1, 2000; Application No. 60/251,989, filed on Dec. 8, 2000; Application No. 60/250,391, filed on Dec. 1, 2000; and Application No. 60/254,097, filed on Dec. 11, 2000.

[1337] Moreover, the microfiche copy and the corresponding computer readable form of the Sequence Listing of U.S. Application Ser. No. 60/179,065, and the hard copy of and the corresponding computer readable form of the Sequence Listing of U.S. Application Ser. No. 60/180,628 are also incorporated herein by reference in their entireties.

What is claimed is:

1. An isolated nucleic acid molecule comprising a polynucleotide having a nucleotide sequence at least 95% identical to a sequence selected from the group consisting of:
(a) a polynucleotide fragment of SEQ ID NO:X or a polynucleotide fragment of the cDNA sequence contained in Clone ID NO:Z, which is hybridizable to SEQ ID NO:X;
(b) a polynucleotide encoding a polypeptide fragment of SEQ ID NO:Y or a polypeptide fragment encoded by the cDNA sequence contained in cDNA Clone ID NO:Z, which is hybridizable to SEQ ID NO:X;
(c) a polynucleotide encoding a polypeptide fragment of a polypeptide encoded by SEQ ID NO:X or a polypeptide fragment encoded by the cDNA sequence contained in cDNA Clone ID NO:Z, which is hybridizable to SEQ ID NO:X;
(d) a polynucleotide encoding a polypeptide domain of SEQ ID NO:Y or a polypeptide domain encoded by the cDNA sequence contained in cDNA Clone ID NO:Z, which is hybridizable to SEQ ID NO:X;
(e) a polynucleotide encoding a polypeptide epitope of SEQ ID NO:Y or a polypeptide epitope encoded by the cDNA sequence contained in cDNA Clone ID NO:Z, which is hybridizable to SEQ ID NO:X;
(f) a polynucleotide encoding a polypeptide of SEQ ID NO:Y or the cDNA sequence contained in cDNA Clone ID NO:Z, which is hybridizable to SEQ ID NO:X, having biological activity;
(g) a polynucleotide which is a variant of SEQ ID NO :X;
(h) a polynucleotide which is an allelic variant of SEQ ID NO:X;
(i) a polynucleotide which encodes a species homologue of the SEQ ID NO:Y;
(j) a polynucleotide capable of hybridizing under stringent conditions to any one of the polynucleotides specified in (a)-(i), wherein said polynucleotide does not hybridize under stringent conditions to a nucleic acid molecule having a nucleotide sequence of only A residues or of only T residues.

2. The isolated nucleic acid molecule of claim 1, wherein the polynucleotide fragment comprises a nucleotide sequence encoding a protein.

3. The isolated nucleic acid molecule of claim 1, wherein the polynucleotide fragment comprises a nucleotide sequence encoding the sequence identified as SEQ ID NO:Y or the polypeptide encoded by the cDNA sequence contained in cDNA Clone ID NO:Z, which is hybridizable to SEQ ID NO:X.

4. The isolated nucleic acid molecule of claim 1, wherein the polynucleotide fragment comprises the entire nucleotide sequence of SEQ ID NO:X or the cDNA sequence contained in cDNA Clone ID NO:Z, which is hybridizable to SEQ ID NO:X.

5. The isolated nucleic acid molecule of claim 2, wherein the nucleotide sequence comprises sequential nucleotide deletions from either the C-terminus or the N-terminus.

6. The isolated nucleic acid molecule of claim 3, wherein the nucleotide sequence comprises sequential nucleotide deletions from either the C-terminus or the N-terminus.

7. A recombinant vector comprising the isolated nucleic acid molecule of claim 1.

8. A method of making a recombinant host cell comprising the isolated nucleic acid molecule of claim 1.

9. A recombinant host cell produced by the method of claim 8.

10. The recombinant host cell of claim 9 comprising vector sequences.

11. An isolated polypeptide comprising an amino acid sequence at least 90% identical to a sequence selected from the group consisting of:
(a) a polypeptide fragment of SEQ ID NO:Y or the encoded sequence contained in CDNA Clone ID NO:Z;
(b) a polypeptide fragment of SEQ ID NO:Y or the encoded sequence contained in cDNA Clone ID NO:Z, having biological activity;
(c) a polypeptide domain of SEQ ID NO:Y or the encoded sequence contained in cDNA Clone ID NO:Z;
(d) a polypeptide epitope of SEQ ID NO:Y or the encoded sequence contained in cDNA Clone ID NO:Z;
(e) a full length protein of SEQ ID NO:Y or the encoded sequence contained in cDNA Clone ID NO:Z;
(f) a variant of SEQ ID NO:Y;
(g) an allelic variant of SEQ ID NO:Y; or
(h) a species homologue of the SEQ ID NO:Y.

12. The isolated polypeptide of claim 11, wherein the full length protein comprises sequential amino acid deletions from either the C-terminus or the N-terminus.

13. An isolated antibody that binds specifically to the isolated polypeptide of claim 11.

14. A recombinant host cell that expresses the isolated polypeptide of claim 11.

15. A method of making an isolated polypeptide comprising:
(a) culturing the recombinant host cell of claim 14 under conditions such that said polypeptide is expressed; and
(b) recovering said polypeptide.

16. The polypeptide produced by claim 15.

17. A method for preventing, treating, or ameliorating a medical condition, comprising administering to a mammalian subject a therapeutically effective amount of the polynucleotide of claim 1.

18. A method of diagnosing a pathological condition or a susceptibility to a pathological condition in a subject comprising:
(a) determining the presence or absence of a mutation in the polynucleotide of claim 1; and
(b) diagnosing a pathological condition or a susceptibility to a pathological condition based on the presence or absence of said mutation.

19. A method of diagnosing a pathological condition or a susceptibility to a pathological condition in a subject comprising:
(a) determining the presence or amount of expression of the polypeptide of claim 11 in a biological sample; and
(b) diagnosing a pathological condition or a susceptibility to a pathological condition based on the presence or amount of expression of the polypeptide.

20. A method for identifying a binding partner to the polypeptide of claim 11 comprising:
(a) contacting the polypeptide of claim 11 with a binding partner; and
(b) determining whether the binding partner effects an activity of the polypeptide.

21. The gene corresponding to the cDNA sequence of SEQ ID NO:Y.

22. A method of identifying an activity in a biological assay, wherein the method comprises:
(a) expressing SEQ ID NO:X in a cell;
(b) isolating the supernatant;
(c) detecting an activity in a biological assay; and identifying the protein in the supernatant having the activity.

23. The product produced by the method of claim 20.

24. A method for preventing, treating, or ameliorating a medical condition, comprising administering to a mammalian subject a therapeutically effective amount of the polypeptide of claim 11.

The application's sequence listing, which the Patent Office published only in electronic form, follows.

SEQUENCE LISTING (311 sequences)

SEQ ID NO: 1 - DNA, 733 bp, Homo sapiens
gggatccggagcccaaatcttctgacaaaactcacacatgcccaccgtgcccagcacctgaattcgagggtgcaccgtcagtcttcctcttccccccaaaacccaaggacaccctcatgatctcccggactcctgaggtcacatgcgtggtggtggacgtaagccacgaagaccctgaggtcaagttcaactggtacgtggacggcgtggaggtgcataatgccaagacaaagccgcgggaggagcagtacaacagcacgtaccgtgtggtcagcgtcctcaccgtcctgcaccaggactggctgaatggcaaggagtacaagtgcaaggtctccaacaaagccctcccaacccccatcgagaaaaccatctccaaagccaaagggcagccccgagaaccacaggtgtacaccctgcccccatcccgggatgagctgaccaagaaccaggtcagcctgacctgcctggtcaaaggcttctatccaagcgacatcgccgtggagtgggagagcaatgggcagccggagaacaactacaagaccacgcctcccgtgctggactccgacggctccttcttcctctacagcaagctcaccgtggacaagagcaggtggcagcaggggaacgtcttctcatgctccgtgatgcatgaggctctgcacaaccactacacgcagaagagcctctccctgtctccgggtaaatgagtgcgacggccgcgactctagaggat

SEQ ID NO: 2 - protein, 5 aa, Homo sapiens
  Site (3): Xaa equals any of the twenty naturally ocurring L-amino acids
WSXWS

SEQ ID NO: 3 - DNA, 86 bp, Artificial Sequence
  Primer_Bind: Synthetic sequence with 4 tandem copies of the GAS binding site found in the IRF1 promoter (Rothman et al., Immunity 1:457-468 (1994)), 18 nucleotides complementary to the SV40 early promoter, and a Xho I restriction site.
gcgcctcgagatttccccgaaatctagatttccccgaaatgatttccccgaaatgatttccccgaaatatctgccatctcaattag

SEQ ID NO: 4 - DNA, 27 bp, Artificial Sequence
  Primer_Bind: Synthetic sequence complementary to the SV40 promter; includes a Hind III restriction site.
gcggcaagctttttgcaaagcctaggc

SEQ ID NO: 5 - DNA, 271 bp, Artificial Sequence
  Protein_Bind: Synthetic promoter for use in biological assays; includes GAS binding sites found in the IRF1 promoter (Rothman et al., Immunity 1:457-468 (1994)).
ctcgagatttccccgaaatctagatttccccgaaatgatttccccgaaatgatttccccgaaatatctgccatctcaattagtcagcaaccatagtcccgcccctaactccgcccatcccgcccctaactccgcccagttccgcccattctccgccccatggctgactaattttttttatttatgcagaggccgaggccgcctcggcctctgagctattccagaagtagtgaggaggcttttttggaggcctaggcttttgcaaaaagctt

SEQ ID NO: 6 - DNA, 32 bp, Artificial Sequence
  Primer_Bind: Synthetic primer complementary to human genomic EGR-1 promoter sequence (Sakamoto et al., Oncogene 6:867-871 (1991)); includes a Xho I restriction site.
gcgctcgagggatgacagcgatagaaccccgg

SEQ ID NO: 7 - DNA, 31 bp, Artificial Sequence
  Primer_Bind: Synthetic primer complementary to human genomic EGR-1 promoter sequence (Sakamoto et al., Oncogene 6:867-871 (1991)); includes a Hind III restriction site.
gcgaagcttcgcgactccccggatccgcctc

SEQ ID NO: 8 - DNA, 12 bp, Homo sapiens
ggggactttccc

SEQ ID NO: 9 - DNA, 73 bp, Artificial Sequence
  Primer_Bind: Synthetic primer with 4 tandem copies of the NF-KB binding site (GGGGACTTTCCC), 18 nucleotides complementary to the 5' end of the SV40 early promoter sequence, and a XhoI restriction site.
gcggcctcgaggggactttcccggggactttccggggactttccgggactttccatcctgccatctcaattag

SEQ ID NO: 10 - DNA, 256 bp, Artificial Sequence
  Protein_Bind: Synthetic promoter for use in biological assays; includes NF-KB binding sites.
ctcgaggggactttcccggggactttccggggactttccgggactttccatctgccatctcaattagtcagcaaccatagtcccgcccctaactccgcccatcccgcccctaactccgcccagttccgcccattctccgccccatggctgactaattttttttatttatgcagaggccgaggccgcctcggcctctgagctattccagaagtagtgaggaggcttttttggaggcctaggcttttgcaaaaagctt

SEQ ID NO: 11 - DNA, 462 bp, Homo sapiens
aaaatttttggatcacagggaacagtccttacccacacatacgccctctcagcactgagccctggtctgcagaagggggaagccttttttgtttctaatgaattgctgtaggctataagtatttctgatgcaagctgaaaggaatacatggggtctttgttgagagtccttttcagtttatttgtgatagtttccaatgtctgaaggagtcgttgctgattttcccattcaagggtatcatttctttcatcgggtaatggcacactagctgtgatgttaaaaattaacttaattttatagtcagataatggggcacttcttttaatccgtgaggacctggcattgccgatgcttgtggctgtttcttgcacagtgtccaggaagtcatcgtaagagtaatccagcctattagctgcaccccagccacctggkccaattgcaaagccattttcatagtcataa

SEQ ID NO: 12 - DNA, 467 bp, Homo sapiens
aggaattcgggacgagttcaaatgcttctgggaaaggagctaataggagagaaacttagcccttcgaaaaacaggaagggatggatcctaggggagaggaggaaggattggctttagaggaaagatgtcctttacgtgaggaaaaggaagaaaaggtgggtttagatactaaatctgtaggtttgctgttaggaaattaaggacttttcacctttatctctgaaatttctctggagttagcaaggcaaggtcatacactgagaaggagggatgaggcagtgtaratttgcagacatacaggttgtaattccttatggaggaaaggggagagcacttttgtcagactgcctgtggctttgagagccctttggctacagtccatgaggtgctcakaggatgagaaagcttcagggtagaagcagtattcaagctgcacctagaaaacagtgcaatacagaacagtggaa

SEQ ID NO: 13 - DNA, 792 bp, Homo sapiens
ggcacgagttttaagctgagtcccaaagggtggaggagtcagtaaggtgaacaggagggataatcttccagattgaaagacaatttgaatggcagctctgggggaagaagaatgtggcacattgaggaactgaaggcattctgtgtggccaagggtattgagtgagtagaaagtgttcaagttaataacaactaaagtatttatatttaaaccttacaattacctgtgagagggcttattattatcatcctcattttacagagaaggaaactgaggcataaggaaattaaatggttaaatagcttgcctaatgtcacatagctcataaataggaaggccaggatttaaacccaaggagtgtagctccaaagtttacccctacacactgcattatgctgtcatactgcccataggaagactcaaaaccttccactatctacgaacaacttttctctttcttttcattttttcttttgagacagagtcacactctgttgcccatgctagagtgcagtggtgtgatcttggctcaatgcaacttccatctcctaggttcaagcaattctcctgcctcagcctcccgagtggctgggattacaggcatgtgccaccacgtcccgctaatttttgtatttttaggagagacggggtttcaccatattggccagactggtcttgaactccttacctcaagtgatctgcccacctcagcttcccaaagtgctgagattacaggcgtgagctactgtgccaagcctacttttctttaaaaaaacaaaaaaaaaaaaaaaa

SEQ ID NO: 14 - DNA, 640 bp, Homo sapiens
gcacgagaggaaagagggactgtacctgaagataaaaataacaaagaaattcctgcacctaaatctctgcagtgaaactaaatcagagagaaactattaagcagccagattttaaaaagacatcactttccgaggagctgtccccttatcaacagaaatgggagcttgaagacagtcaaatgatatcttccgtgagttgaaagatgcactgccagcctagaattatacacccagggagaccatctttaaagaatgaaggtgaaatcaaggcattttcaggcaaacaaaaagcttactttggcaccagcagacctgcacaaaaggatatacctcaggcaggaggaaactgaccccagagggaagatctgagaataacggatactgtgcacctaaattaaagctgaataaacaagaataacgtggggtacaacattttagaatgtggctgcacagtacgaagaggaatgaagggagggaaactgctcaaaggcccccccgccatgctgccctggaagaggatcaagatgcacattcgcttctgagtgtatgaagtatgtttattgcgattcctagggtaaccgctaaaataacccatttagctggaatcccagaaggaaagaagaaaaaaaaaaaaaaaaaa

SEQ ID NO: 15 - DNA, 316 bp, Homo sapiens
  SITE (54): n equals a,t,g, or c
  SITE (64): n equals a,t,g, or c
  SITE (277): n equals a,t,g, or c
tgccaaaacttaagctgacttagaagttacattaacaggattcagtgattgttnggatgtgggnaagggagctgcttaagatggtgtgatagttaatttggggtcaacttgggtggactaagggatgcccagatagctggtaaaacattatttctggatgtgtctgtgagggtgtttctggaagagaccagcatttgtatcagttgactgagtaaagagggtctgccctcataaatstggatgggcatcattcaattcattgggaacccaaatagantaaaaaggtggaagaagaggctgggcgcggtggcttacg

SEQ ID NO: 16 - DNA, 1859 bp, Homo sapiens
cgctctgggacactcagtctgatggggcaggctggtcagaagacatagagccatggtgtgtttggaactttcacagagggaagcctggggctcgggaagcccggaaaagatgccggcgcagcctgagggcttgtacaggtgccactgtgccgaaggctggctacgagggaggcaggtgtatgggtgagggtgagtgcagtgtggctggaggcttagggaaaggtgagtaggacggcgagagacccacggggaatgagggctggacctcagcctgagtgagtgtgtttggtggggtgagcagtgatgtcagtccctcctgggagctgctgtgatttggggctttctactttattcactcaacaaacgtttctcagaatggagggtgctcggggccgtagggcacagatactgatgtggccctttagggtcacagggtccagggttcaagtcccagctccaccactatccagctgtgcaacttttgacagtttgctgtacctctctgagtctcagatacttcatctttgaaatgggcagaagacacctgccccgtggcttcctgtgaggatgtatagaaaatgctggtccagctcctggaatggcatgtccctcccccaccctaaagtgcacgtttagtggaaggaaaggggggatggggaaggatgggggatggggacagaagtgagcatctgaacctaacaggagggctggtccctgcctggtggggcagcaaggggtcctgccacagcccagcgaggaggtgggcatcccagagccgcagcagtggcagcgctgcctccatggaggtcccacagcaggactcgccagcctttgtcctccccaccctgggtgcccgactttcccatggaagctgctgcatcttcccatgcctgcccaccacagcaggtgggctgggacgtctctctgagctgcagatcccctggttgggagagtaggggacggacatctggcctgagacccccccacacacaccagggcaggttcctggctccctgccagagcctagctgcctgcctagaggctcagagtccccaagaactcaaggtgacacagtggtggcagtgtgtgacagaggaaggagccaaggtgggatttgagaacctggggcagggcagggcagacctggggcacaggctgcgggacccggacagagcagggtcggactacaatgtggtctccacattcatgcatccatcatgcagctctcactggaccctggcattccagggccacgattgtctgccagactagcacggcagcggctctgccttcctcaccctactgtgctgccagtggttcctgtgtctcttctctctcggcccctgcatctgcagagctgaggtgctgatcctcctctcctggcctctgtgtgaggctcaaatgacaccagcccatgaagggctcagcacatgcctgccacatagtaggagtctgcaggatgatggctgttcacccggagggccagccttcctttgactgggttcctgggaactctgggaagtgctttgcaaaatgttagttaaaaaaaaagtttgggaggccaggcgcagtggcttatgcctctaatcccagaactttgggaggccgaggcgggcagatcatgaggtcagcagtttgagaccagcctggccaacatggtgaaaccctgtctctactaaaaatataaaaattagctgggcatgatggtgggtgcctgtaatcccagctactcaggaagctgaggcgggagaatcgcttgaaaccggaaggcagaggttgcagtgagccaagatcgcaccactgcactccagcctgggcaataagagcaagactttgtctcaaagaaaaaaaaaaaaaaa

SEQ ID NO: 17 - DNA, 1613 bp, Homo sapiens
ccccctccttatgttaggccagtagttatctaactatggccttatgggactctggtatcccaccagccaaagagaggactcttcccaaattatagaacaaaaataagccaaaggattggagtgtttcaaacacatgctttcgtcttataaatgttctgtaaaccctccatgactatgacaaaagttaaaaacaaatgccagacaaatgttgattcttccttggtttctgggacgccaccctctcctggttctcctcctgtctccgtctcattttggggccacccactctttctgaagcatctcttcaatgctggtcttcctcaggttctgtccctgtgtctctgcccatctgcctccaacactcacgagtgatctcaccaatgtccatgagctcagtgggcccctccttttttttttttttgagactgagtctcattctgtcactcacgctggagtgtagtggcacaatctcagctcactgcaacctccccctcccaagttcaagcgattctcctgcctcagcctcctgagtagctgggattgcaggtgtgtgccaacacgcctgcacccggctaattttctgtttgtttttagtagagacggggtttcaccatgctggccaggctggtcttgaactcctgacctcaagtgatccgcctgcctcagcctcccaaagtgctgggattacaagtgtgagccaccacgcccagctgccccctctattctgacttcagctgagctctttctccccagctgggttgcctctaagacatctcgttgtgactgccccacacaccccctcaagttcagcaaacaccaaaaggaactgatgacctacctccagtcccaaatgtcttgtgctctactatcttcttagttgctgaagtcagaaactagtatccttctccccacactgctttgtttccagagctccccatgttacttgtgcctcccacgtggttctccaatgagtccacgtctctccgtcactgttctgaggtcagacaattgccagcgcttgccaggagaatatcaacagccccctgactgctcccctgcctctggcacctcacctgccgtccactttctacatggcacccagtgacttcctaaagtgaacatctgaccacttcattcctttgcttaaatcttctctttgcccgttaaccccagaaaaagaccaaactctttaacatggcttacaagatttgtcaggatctggtcactgattatcttttgccaaactcttctcccccaacccccttgcaacctccactctgcccaagttttttgctccagccacttaaaatgaccttcacaggccgggcgcggtggctcgcacctgtagtcccagcactttgggaggccgaggtgggtgaatcatgaggtcaggagtttgagaccagcctggccaggatggtgaaaccccgtctctactaaaaatacaaaacgcagccgggtgtggtggcacatgcctgtaatcccagctactcgggaggctgaggcaggagaatcacctgaacctgggaggtcagaggttgcagtgagcctaggttgcaccactgcactctagcctgggtgacagagcaagactccatctcaaaaaaaaaaaa

SEQ ID NO: 18 - DNA, 1236 bp, Homo sapiens
gccttccaaggcaacagacactgagcaagcagcagggaggagaatgtcctggaagggcaggactctacccaagtccctaacatccccagactcttctcttccataaactctctaattactctgctgtttaaatcctggttttggtcaagccagtcaggttgcataaagaatatgaatacagtatgcatcaaagttgcttcccagaacaggaagcaaaacaaacaaacaaacaaacaaaatactgatatcagtacccagggtgcccaattaggtcacacccagtggctgcattgcagcccctgagctcctgctgcaccgtgtgtcctgctgcccgagtgggccccaccctgggttctgaagatgcccttcttaatggagagctcccgatggagggctccaggactgatgctctccctaaggaagggaggcctcagatttggagagggacaccaacaggaccagaggaggactgaggggcactggcaccaataagtggaagggaacagcgtggtaacaaaaaagagccatgccacttgcatgctggagggagtctttttgtgtcagcctaaagcttaggctggtgtccatgtggaacatgacatctttccagtatccctgatccaggaaactgcagtgagacccaggtgacccagctctgtgtcatttggagcccattaaaaagtgaggcagccacatggcggggacattgaccccactccagaccacactcccatctccatacataggatagaaactgttcatcaggaaggaaaaccaaacagaaatttgtggtctaggggaggggtctgcattcagcatggccatgctgggctggagtggctgtggggtgtccagatagatgggcatgtagactagtgctttctcaacctttaatgcatgcacaaatcatcgagatcttgttaaaatgtagatcctgggtgggcacggtggctcacgcctgtaatcccagcactttgggaggctgaggcgggcggatcatgaggtcaggagatcgagaccatcctggctaacacggtgaaaccctgtctctactaaaaatacaaaaaattagccaggcatggtggtgggtgcctgtagtcccagctactcgggaggctgaggcaggagaatggcatgaacccgggaggcggagcttgcagtgagccgagatcgtgctgctgcactccagcctgggcaatagagtgagattccgtctcaaaaaaaaaaaaaaaaaaa

SEQ ID NO: 19 - DNA, 2902 bp, Homo sapiens
  SITE (1858): n equals a,t,g, or c
  SITE (1875): n equals a,t,g, or c
  SITE (1939): n equals a,t,g, or c
  SITE (2107): n equals a,t,g, or c
  SITE (2893): n equals a,t,g, or c
gtggggatcattcccatatagaagaagcagccatggatggtacactgagaaggattttagtacaaaagaacttacagagacccacaggtttggctgtggattattttagtgaacgcatatattgggctgactttgagctctccatcattggcagtgttctgtatgatggctctaattcagtagtctctgtcagcagcaaacaaggtttattacatccacataggatcgatatctttgaagattatatatatggagcaggacctaaaaatggtgtatttcgagttcaaaaatttggccatggttcagtagagtacttagctttaaatattgataaaacaaaaggtgttttgatatctcatcgttataaacaactagatttacccaatccatgcttggatttagcatgcgaatttctttgcttgctaaatccttctggggccacttgtgtgtgtccagaaggaaaatatttgattaatggcacctgcaatgatgacagcctgttagatgattcatgtaagttaacttgtgaaaatggaggaagatgcattttaaatgagaaaggtgatttgaggtgtcactgttggcccagttattcaggagaaagatgtgaagtcaaccactgtagcaactactgccagaatggaggaacttgcgtaccatcagttctagggagacccacctgcagctgtgcactgggtttcactgggccaaactgtggtaagacagtctgtgaggatttttgtcaaaatggaggaacctgcattgtgactgctggaaaccagccttactgccactgccagccggaatacaccggagacagatgtcagtactacgtgtgccaccactattgtgtgaattctgaatcatgtaccattggggatgatggaagtgttgaatgtgtctgtccaacgcgctatgaaggaccaaaatgtgaggttgacaagtgtgtaaggtgccatggggggcactgcattataaataaagacagtgaagatatattttgcaactgcactaatggaaagattgcctctagctgtcagttatgtgatggctactgttacaatggtggcacatgccagctggaccccgagacaaatgtacctgtgtgtctatgctccaccaactggtcaggcacacagtgtgaaaggccagccccaaagagcagcaagtctgatcatwtcagcacaagaagcattgccatcattgtgcctctcgtcctcttggtgactttgataaccaccttagtaattggtttagtgctttgtaaaagaaaaagaaggacaaaaacaattagaagacaacctattatcaatggaggaataaatgtagaaattggcaatccatcttataacatgtatgaggtagatcatgatcacaacgatggaggtcttttagatcctggctttatgatagacccaacaaaggccaggtacatagggggaggacccagtgctttcaagcttccacacacagcgccgcccatctacctaaactctgatttgaaaggaccactaactgctgggccaacaaattactccaatccggtatatgcaaaattatatatggatgggcaaaactgtcgaaactccttaggaagtgttgatgaaaggaaagaactgcttccaaagaaaatagaaattggtataagagagacagtggcataatcagtgatatcttttatatgctgtataaatgtataaaatataaggattacttttgtatgttccaacagtattatacttgttttggcatcagcattacctctttctttatctwwwtcctggktaattgktttctgagytttttgggttttattttttgctgatgactattgattgaccatttgtatggtatttanatgaaaaagaactgcantacagtacaatttacaacaatgctgctgatatgacacacctttgaatttgttaaaattaaaaanaacgtattcctttgtagtgtgaatatgagcaatctattttatatgaacttttttggttgtacttaatcaacgaggagaatctctgcacttttccattatacggtttgaaggctgtaatacagtgtcattttatttttctgtttaaattgatggaaaaatgattgaatngtcaactctcttctttgtgcccataaagatcgattcagactctgctgaaaatatatagctctcacaagttcagcatcacctgctttgaaattagccttagattgccaaccaatagatgagaattttgaggaaaaaaattaaaaatatgtaaaattaataatttgcatgaacacagatgactacattttccaaaacttagtggactctatgtgatgtactaaatgtatacaccttgtaagcaatagttatatttaggtggtagaacatagcaaaaatataaccgaaagttggccgactgcacttgctatggaataagaccttttattctccctcagtctcgagataaatagccagcctagagcacaacagggcattgggtacttgcatcttaggtatttcttcccagtcacatccattttgtggaagattaacccaaccccttacactacactgaacactaaagaataacatataagcacacaaattggtgacagaatttcaattacgtgaacgcatcctctttgctaggtcmaaaacaaagggcaaagcagacattttagtatacagagtgattggcaaatattttcaagatttaatatgagcaacccattatttgccctatccaaaatatattcaagggccttccargttgtagaagracaatgatcttcccataatcmaaagtggrgagtcgaatgctgtgcagttgcckggkattcrggttcyckgggttttaccagaacgccatggacccccattcacgttttggtttgtttatcctccaantttgagttt

SEQ ID NO: 20 - DNA, 1865 bp, Homo sapiens
aaggcattctatttgttggacatttttagccacagttctccttgtacacccctcaaaaaagaaagagaaaagtaatcaacagggaggaacaagggaacacaaagaggagataagaattttcttctacatgtattctgcgtttctcagccttctgtggtgttactatcatcaatgaaaaggcatttaagatccttaagttagaaaaatcttttctgcccaattccccacttcttgtttggaaacaagaacatgctctgcaagacctgtaagcacagatttaatttccatcatgatgatgatgataaaattttaaaaatggtgaacattcatatagtactaactatatgccaagcactgttctaagtaccgtgcaactattagttcatttaatccttacaactccactatgacttccgtggttagctaataatgtgttacctccatttgcagatgaggaaaatgaggccagaggggttcactcacttgcccacttcctccctgcttggacgtgtgtaagactggtgcctggtttttggctccaggctggctcctggtggctcccctgctctctccagcttagcatttatgaaagttattccctgagactcccaaagtgctgggattacaggcatgagccaccatgcctggccggacttctctatatcttaagttctaacccctgtcctgtcaaagccagagaactgagacctggaaagaaatgaatgggctttgctgtcgtgtaaagagcccccactttggggttggctgggtgatggctaaaatgctgtgtgtataatcctgggcaagtgatttgacttctctgtgccaggtttgcacatctagattgtaaaatagagcaatcatgtctattcaatgttgttctaaggatgagatgagatgcatctgcctggcaccttgtaagtcctgcacaaatgcaaattatcactgttaagtaagcttcaccatcctgtaaaacaatctgtttgactcacttattccaagtaagattggctggacctgtacattcttctttatttaaaactatcaatgttactgttcatttttaaatagacagtggctatgatttttagtttttttagccttacaaatgagaaacctagaacttcaacaagcagtaaaattgagcaggttaggtattcctcactagcagcataaacccagcagggtgaggtgattcctagggcctcctatagtctcctagcagccctgataccctttgtttacgggtccctgggggaagttgaggacttaaagtctctctagtaggcttcagagctccttatttgagcagaactgtgacatcttggagaaagaagagaacaccaccagtcagaaaagcccacaattgtagtggtgtcccggttctgaatacaagttacctaacgcctctgagccaatttcctcaactatgaaatagaaataatagtgcccgtctcacagatactataactacgaagatcaaattagatcgcatatacatgatgaaagtgttctgtaaaaagttgccatctgtctttgcttggatggacctgagttcctgagttggctctgaaaacagcttaccacgaaacaggataggattagtgggacagccttgctgacacagatcataacagggagatgtctcattttgacttggaagttgcactgatatcatagaaaataaaaaaaccaggtttaactgttggttggtaccttgtgagaagaggaagaaggtgataagaactaagatcagagcatagtagagaaagtagccctgtaaacagaggagaagcagaaagagagaagggaggacagagcttttattttgctccaggttaaaaagaaaaaaaaaaaaaaaaaaa

SEQ ID NO: 21 - DNA, 2018 bp, Homo sapiens
  SITE (1984): n equals a,t,g, or c
  SITE (1989): n equals a,t,g, or c
  SITE (1990): n equals a,t,g, or c
ggcggccagggaagcggcggctccgtgaccagtgggtgccctcgcagtgggtagggtcccggagggtcagcggcaattggcgcaacgcttgctgccgggtttggtccaagggctgcgacgtagcgggactgcacgctcgggagaagtgccacgcgcgtctgtcgcctgaccggggaggctggggagggcccaggccacggaaacaagactgcagaagtttctggrcactcagtcgggactctcatttaatacccagagagaggagatcttccaggttgccccgactcccaccgggactcctaccagcagcaacctcatcattgtggccgaggcaggaattatccagactgccttgccactagatgaatggaagacaatgatttgaactaagggccagcaaagaattatccctggtttttgtgctttgcagcattcctcaaattgttttcacatctcttaccataaaaactgcattgaaattgaaaatgaagcagttgaaaagaaaaaggaaaagcaattttagtgttcaagaaactcagacccttttgaaagaaattacgaaaaggaaagaagtcattttttccaagcagctcartacaacaattaatgtgatgaagcgaatggcttgggaagagattgcacagtgtgtgaatgctgtaggagaaggagaacagaggacagggacagaggtgaaaagaaggtaccttgactggcgagcacttatgaagaraaagaggatgaaggccaacattaagctggttggttcaggatttccccttccctcctctgatttggatgactctctcactgaagagatagatgaaaagattggattccgaaatgatgcaaattttgactggcaaaatgtggcagattycagggmtgcwggtggatccttactgaggtcaaggtggaagaggaagaaagggatccgcagagtcctgaatttgaaattgaggaggaggaagaaatgttgtcatccgtcataccagattccaggagagaaaatgaacttcccgatttcccccacattgatgagttttttacccttaactcaacaccatctagatctgcatatgatgagcctcatttgctcgtaaatattgagaaacagaaactagagttggaaaaacgacgactggatatcgaggccgaaackgcaggtagaaaaggaacgcctacaaatcgagaaagagaggctgcggcatttagacatggaacatgagcggcttcagctagagaaggagcggctgcagattgaaagagaaaagttgaggttacagatagtcaattcagagaaaccgtccttggaaaatgaacttggtcaaggagaaaaatccatgcttcaaccacaggacatagaaacagagaagttaaaacttgagcgagaacgcttgcaactggaaaaggataggctgcagtttttgaagtttgaatctgagaagctgcagattgaaaaggaacgcttacaggtagagaaagacagacttcgaattcagaaagaaggacacttgcagtgatttttccaggcttccatttagcaaatgtttgaaaactctagatttttctcatatcaggtgatataatgatggttgctggattagctgtggtttcttgtctaatgtcagtgttcagtaggaaaaagttatatgtggataactgtatgcctaagtagtatataaaagctgtgccctagcgtaaacagtatagcagaaacttactgtgctggactctttaccttataatattacatagagtcttgtattgtctgtgtacccagagtttacaattatgtccatataaaattctagcccagaagttctcatctggggtagattttggccttcagaagaccaatttggtgatgtctggagacatgttgggttgtcaaaactggggtggggaaaaggttgctactgtgcaatgcatacctcctcaacacccccccacactgcagtgaaagaattttccaacccaaaatatncattnntccctgaagttggagaaaccctgttcct

SEQ ID NO: 22 - DNA, 2492 bp, Homo sapiens
gattccaataccaggaaagagcaaaactctgacctctgactccagctcgtcctgcatctcagcagctgtccccgtgcctccctgcccctcctcggaaacctccgagtcactgctcagcaaggaccccgtggaaagcccggccaaaaagcaacccaaaaatagagtcaaattggcagccaacttttccttagcacctataaccaagctttaactcccatttggaatatagaattaggatgggaaaacactgtctgattctgcacacaaaagtgggtttcaaaaatacatccttttctgtgtcatgaaaaccccccgaagccattgacttcatcttacctgtgttctatcatgtttttcttttccattgaacacagctttgagctgaagtctttcttttcttcttcctttttctttcttttttcaattatttgaagaacttgtggcatttgttaaagaatccttaatatattttaccaaatttttagtaactattatgaaatacaatggtgktccaaaagaagaaagcactaaaaactcaactagcaggaagcggttttgcttccattgagccacgtcggtggtgtcatcctacatgtagcataatagagtctctcagcctttgcttactggtgtttccgacagtattaacccagtgcgtggcatgtctttgaagcaaagcctgtcccgctagcctgtgtgttcacacaccaaaggagaagggtaggcgaggggttcggagtgtattttcaggttggaatgtgaaggttcctggcttccatgtgacttgtaagtgtgccttgttttttatttaaactatgtctgtagttgacaaaagtggcttcatcacaaatttttttaaacgtttctactttggggttccatttaggagctttctagaaagttgaggatgtttgaagcttcccttctgtgttccagtttgatatgggttaggttaaggaaaaggagatggtctcgatgtcatggatttaaagtcagcatttggattacaacacacattattgtgtgtcgagaggcagcattggaaagagcctgattttctaaaatatgcatcaagtgcataaattacaaatcagagctgagtggggaggtgcttcagcagcagcgggatcaatacgatttccactgggaagagacaggaattctacctacacataggaaggccaaggttgatccacttaaccttgttattgtaattttaaagctggtatcggtagctgggaagctttatgtgtgtgtatgtcagctcagcatcttttaatcgtgtctgattttactctcgttacttctcgctgttggaagcatctctgggtttcttgtggcgtctggtgtggaatggccttcctctctaggtgcctgaggtgtccgctgacgggtggcctctcacccycctctagagaaacctgacattyattcatagagcagaaagaacctgttggcgtaaggtcttccactagttagatggtttcttttggggaaatgtttatatttggtaacttctagaaagccagaaaatggactctgatttcatagcattttgataaaatgccacaaaataagggctatagagagatttttacaagtcagattttttgttccccaaatcttttaaatgaagccagtgactcccagttctcaacacatggccccagtcaagacagaacaccatggaaaaaaccctgtaagtattatggcactctccgaatcctcctgaaggcatttcctctacagacatagtgttacaggaagtgaaatgcaaatgtgcaattttttttaaaggagcttttaaacaaagtaataataattggtgttgagaacatcagttgccttattctaagatttcataaggctgagtttgcacgcttggacttcagttctgctagcatgtaaagagtggtggactttaaaaccgtaagaggtatcattacaagtcacctggaacagactcaaagaacaggttctttgggcaacagacaaagaagaatcaagttctgtgctgtcccgtgagtgtgtctgagtaccattcactggagttgctgcttaggtctgggacgtgtgtgtgactcttaacaattgctgtctgaaaatgagagagaagacttcggaagcacattgtgttcataatgtactccacaatggccagtccaattgctatctatttttttatccagaggcttaattaaatgatgtggtaaaatgatgtttgagcattaagacaatgtaattctttatttctgggtggaaagatataccggattaaatttatctgtttaaaaaaatgacaaaagttatcaccaaaaccccctttcccatcttgcactgtttgttttggattgggtttgggggaaagagatgtttttcttagttgtctactttgtttgaacacttttgttgtggttcaagtgctgttttgtgtgttgggaccaaacagttgtcaataaactttacaagcgagcatctaaaaaaaaaaaaaa

SEQ ID NO: 23 - DNA, 1176 bp, Homo sapiens
gagcaataatgtaaataacagcctagaatcatcctagtgcttccatcagcagaaggcttgctaaaaaaggcgtgagcagcggcgtctgcgaatgggaacatcaaagactctaggctgttaaatagatttctcaataatgtaaataactaaattgttctctgcatatagcaggaaaactagcatgaaatattgtttcaggccctgggttctatgtgacactacattaggaattggattgtttgggtttgctttgtgtttttgaggtagaggaagaaatgggaatcttttttttctcttccaggagtcagtggaagaatagttctctagctaaggaayggacatacctttgttttaaaatattttatacttacaaaaatctagaaatggagagggaactgttttgaataaggatttaaaatacctgcacaaggatagagagaaactatgtgactcattctgtgaaaagacttcttgcagttgtgagttatttagaaatgatcaaaatttgtaattaggctaatccatttagtgattcctaatattttgtactcacagagaactaattgactaaacaacttgaacgctagtggtttgtccttagacaatctgtctttgaatttaaagtctttatcgctaagaccttgactttaaatttttcatcactacaaccttgaatttaatttcaggtcttcaacatgatgaccttggatttaatttaaagtcttcaacactatgcgctttatcatattattcacagatgcatttttgaaatgtagtatgtaaaagtatgtaacgtgctgtttattaacaaaagattgttcacaacatctcatgtagtttaaatttgtaaatactgcttctgttttgtttctcctttatacacttgactgtctttgtgataagtgacatgaattttatgttaggattaagtatgttttcctgaaacttggattttttttgtaattatataattgagagttaagaatgaaatccttcaagtgttaaaaactcacattttaaaagcaaattttggttccaaaaaaaaaaaaaaaaaaaaaaaaaaaaaaaaaaaaaaagggcggccgctctagaggatccctcgaggggcccaagcttacgcgtgcatgcgacgtcatagctctctccctatagtgggtcgtactaaaggagtccata

SEQ ID NO: 24 - DNA, 1348 bp, Homo sapiens
ccacgcgtccgccgactgccacgggccgggagacgggcctgggagcggcggcggcggcccgagagctgcgccgggagagctgtgccgcgagcctccgcctcttttttggcaccgcacagtggatccctggaggccgagcgccacgccgcccgggtacccggcagatcgcgaggtggaacgggccgtcgctgcgggggacagcgttccgaggcagttggtcctctccgggatgccgtaggcatcagctgaccggcccagcccacgtgactacaggggcacttgatgggaatcatggcagcatccaggccattgtcccgcttctgggagtggggaaagaacatcgtctgcgtggggaggaactacgcggaccacgtcagggagatgcgcagcgcggtgttgagcgagcccgtgctgttcctgaagccgtccacggcctacgcgcccgagggctcgcccatcctcatgcccgcgtacactcgcaacctgcaccacgagctggagctgggcgtggtgatgggcaagcgctgccgcgcagtccccgaggctgcggccatggactacgtgggcggctatgccctgtgcctggatatgaccgcccgggacgtgcaggacgagtgcaagaagaaggggctgccctggactctggcgaagagcttcacggcgtcctgcccggtcagcgcgttcgtgcccaaggagaagatccctgaccctcacaagctgaagctctggctcaaggtcaacggcgaactgagacaggagggtgagacatcctccatgattttttccatcccctacatcatcagctatgtttctaagatcataaccttggaagaaggagatattatcttgactgggacgccaaagggagttggaccggttaaagaaaacgatgagatcgaggctggcatacacgggctggtcagtatgacatttaaagtggaaaagccagaatattgagttatttgttaacaagtttcgagagagaagggagcaagacaagagcaagcaacggctattaaatgtcacaatcctttaattagaaaccatttattggccgcacgcggtggctcacgcctgtaatcgcagcactttgggaggccgaggcgggcggctcacgacgtcaggagatccagaccatcttggctaacagggtgaaaccccgtctctactaaaaatacaaaaaattagccgggcgtggtggcgggcgcctgtagtcccagctaatctaggggatgaggcaggagaatcaattgaacccgggaggcggagcttacagtgagctgagattgcgcccctgtactcctgggcaacagcgagactccgtctcaaaaaaaaaaaaaaaaaaaaa

SEQ ID NO: 25 - DNA, 1539 bp, Homo sapiens
ggcacgagctcgtgccgcttcattttagtcatactgtagactcattaaaaccagggttcaaggactcacctaagtgcagccaagctggaagaattcattccgagtttggtgtcgaattctctcaaatcaaccagccagactctaactgtaccctcagcattgccaacaggctctacgggacaaagacgatggcatttcatcagcaatatttaagctgttctgagaaatggtatcaagccaggttgcaaactgtggattttgaacagtctacagaagaaacgaggaaaacgattaatgcttgggttgaaaataaaactaatggaaaagtcgcaaatctctttggaaagagcacaattgacccttcatctgtaatggtcctggtgaataccatatatttcaaaggacaaaggcaaaataaatttcaagtaagagagacagttaaaagtccttttcagctaagtgaaggtaaaaatgtaactgtggaaatgatgtatcaaattggaacatttaaactggcctttgtaaaggagccgcagatgcaagttcttgagctgccctacgttaacaacaaattaagcatgattattctgcttccagtaggcatagctaatctgaaacagatagaaaagcagctgaattcggggacgtttcatgagtggacaagctcttctaacatgatggaaagagaagttgaagtacacctccccagattcaaacttgaaattaagtatgagctaaattccctgttaaaacctccaggggtgacagatctcttcaaccaggtcaaagctgatctttctggaatgtcaccaaccaagggcctatatttatcaaaagccatccacaagtcatacctggatgtcagcgaagagggcacggaggcagcagcagccactggggacagcatcgctgtaaaaagcctaccaatgagagctcagttcaaggcgaaccaccccttcctgttctttataaggcacactcataccaacacgatcctattctgtggcaagcttgcctctccctaatcagatggggttgagtaaggctcagagttgcagatgaggtgcagagacaatcctgtgactttcccacggccaaaaagctgttcacacctcacacacctctgtgcctcagtttgctcatctgcaaaataggtctaggatttcttccaaccatttcatgagttgtgaagctaaggctttgttaatcatggaaaaaggtagacttatgcagaaagcctttctggctttcttatctgtggtgtctcatttgagtgctgtccagtgacatgatcaagtcaatgagtaaaattttaagggattagattttcttgacttgtatgtatctgtgagatcttgaataagtgacctgacatctctgcttaaagaaaaccagctgaagggcttcaactttgcttggatttttaaatattttccttgcatatgtaaatagaatgtggtgagttttagttcaaaattctctgttgagaataataaatgcatgaaataccttaaaaaaaaaaaaaaaaaaaaaaaaaaa

SEQ ID NO: 26 - DNA, 1371 bp, Homo sapiens
gcacgagcggggacggggtcagtgccaagatgtcgacggcggcggttccggagctgaagcagatcagccgggtggaggcgatgcgcctagggccgggctggagccactcgtgccacgccatgctgtacgccgccaaccctgggcagctcttcggccgcatccccatgcgcttctcggtgctgatgcagatgcgtttcgacgggctgctgggcttccccgggggcttcgtggaccggcgcttctggtcgctggaggacggcctgaaccgggtgctgggcctgggcctgggctgcctgcgcctcaccgaggccgactacctgagctcgcacctgaccgagggcccacaccgcgtcgtggcgcacctgtacgcgcggcagctgacgctggagcagctgcacgccgtggagatcagcgcggtgcactcgcgcgaccacggcctggaggtgctgggcctcgtgcgggtcccgctgtacacccagaaggaccgagtcggaggcttccccaacttcctgagcaacgccttcgtgagcacggctaagtgccagctcctctttgccctcaaggtgctcaacatgatgcccgaggagaagctggttgaggccctggctgcagccaccgagaagcagaagaaggccctggagaagttgctcccggcctcctcttgagggctgcctgagctggtggcaccctcccctgggccggaagactgggaattcctgctaagtgtggcttctagagtgtttgtgtgtaccccgcttctgactgcctagggcgagtgggcatcctgtcatcatctccactgtcccaagcagtcactaggtggcggccgggccagctggaacccagcccatcctctcaggcagagcagggtggtccgggcacactgggcctgcctctccagcctcaggatgctcttgtttattctgggctcagaccctcctcttgtacgtctcatcacagctggtagagacccaggagtgcctgattgtcccccaggggtggcgcacagctctgggaccactcaaaaaatgggatgtgtgggtggaggatgccttgtctcggtcagctcattcctgcctccttcctgagccagttcagggcctgggggagagccagcttggggtaggaagttaataatactgttaatttgggttgttgttggatttactttgctagattttctctttccccacgtgtgaactgtgggtgaggtttcaaagtagcttccccccccgtggcttggttcccagggacagtcagggcctcgggggcccagctatgtacaacgaagctgtcgaaggagaagacaataaagtcgctccgcagctgcaaaaaaaaaaaaaaaaaaaaaaaaaaaaaaaaaaaaaaaaa

SEQ ID NO: 27 - DNA, 531 bp, Homo sapiens
  SITE (12): n equals a,t,g, or c
  SITE (15): n equals a,t,g, or c
  SITE (51): n equals a,t,g, or c
gaagctagcggnaancgcgcgctgcaggtcgacactagtggatccaaaganttcggcacagcgtaaaatccaaaacttgttttttcactcatgaatccttctggcaacgattgagctcatattactaaatgcaacaatatatttaagtagtaagcacagtgcctgacccatggtatgcattcagtgttagcaatttaatttttatgatgattattctttgtgattagaaggcgattgaaaatcagtaagttctataggtacttgtggcctcaaaacattatttgataatggatagctatttataagttttagaccatgtgagttttatagcatatgaccatgttgkaaagtaattttacacacaaatgcacacatacacatttagatggataatttccctttggagctaaataaatatcttagtaatataaccatgactcaaaataattttggaacatctttctgatatttatcttctgagatattttgagccaaataagaaaaccagtctcaatgttttgtaaacatttt

SEQ ID NO: 28 - DNA, 2627 bp, Homo sapiens
ggcacgagaaaagcagagggtcccgcaacgggagcggaagcggcatgacttctccttgtttaagctttcggacacggagatgcgggtgaagatctcaccacagcttctgctagccacacaccgcttcatggccacagaagtggagccctttaagtctctgtacctttcggagaagatcctgctccggctcctgaaacatcccaacgtgatccaggagctgaagtttgatgagaagaacaagaaggccccggaacactacctctaccagcgcaaccgccctgtggactactttgtgctgcttctacagggtaaagtggaggtggaggttggtaaggaaggccttcgctttgaaaatggagcctttacttactatggcgtcccagccatcatgaccactgcttgctcagataatgacgtgcggaaggttggaagtctggctggatcttctgtctttctaaaccggtccccttctcgctgcagtgggttgaatcgctctgagtctccaaaccgagagcgcagtgactttgggggcagcaacacccagctgtacagcagcagcaacaacctctacatgcctgactactcagtccacatcctcagcgatgtgcagtttgtgaagatcacacggcagcaatatcagaacgcactcactgcctgccacatggacagctcacctcagtcccctgacatggaggccttcacagacggggactccactaaggcccccacaacccggggcacaccccagacccctaaggatgaccccgccatcacgctcctcaacaacaggaacagcctgccgtgcagccgctcagacgggctgagaagccccagcgaggtagtgtacctgaggatggaggagctggccttcacccaggaagaaatgactgacttcgaggagcacagcacacagcagctcacgctgtctcctgcagccgttcccacgagagcagcatcagatagtgaatgttgtaacatcaacctggatacagagaccagcccctgcagtagcgattttgaggaaaacgtgggcaagaagctgctgagaaccttgagtggccaaaaaaggaagaggtcaccagaaggagagagaacctctgaggacaactccaatttaacacctctgatcacatgacagggcaaagccagcattcactgggtgtgtgaaattccagagctttgggggagaatccaccctcccatcatctgcttcccccaaggcctcccacaggtgacagaatgttctgccttcccttccatctcttcacccctagctgtcagtttggcagattttccctcgttacctccagttcgactcagaaccttgacatggccataacagaaggaggtgcctctgatagaacatgctagaaatggtcttttccacagcatagtctgggactggaaaagagatgtctgactgcaagctgacaatgccactctgggacccctgatgctcttctttgttctttgggtcccctgatgccataggagacctatcgtcttggaacttgccattctttcctccagaacaaaatgttaactttctaacacatttcatgcatagcttggctcagaaggtgccattggcagacaggcacatgggaggctggagtaggaggtctgaagattagttcaggggatggaccaagaatttcccccagagctttaaagaagtgggactcagccatgttggcgcgtgattgacattacagcacagaaaactgttagtgactggtttcctgttagataagggttccagcagcctggggcagtatgtctcagctggaatggaaagaatgtgagatggaacctcaagtcactgtttttaccagggacacatctgttttggctcccaatcagcagtcttcaatcgatcaataattctgctctggaagagaaggaacagggagcagagagacccaactgggagccagagatggaacttcaggtcttaagtgcaaatcaaagcaaaaaacaaacaaaacttacatggaaaaactgtaagtgctgaaagcaagtttagccatgacaaaccaaagagtgcccaggtcagccaagaaagatacataatctcatgggacttcagtgggagttacacaggaatgttgaagaatcattcttctttttcatgcatttgtccttctcccacccccttactacaccctagcagatcagctgagtgtactttattccaagaacttactggatctctggtttttctcctgaagttggggcaggtgcaattccaagcataaccaccagatggcagagtgaccgcgcatacctgcttccaagaataaaacagttctgaaaagcaaccgcaaagccgggcgcggtggctcacacctgtaatcccaacagtttggaagaccgaggcgggtggatcacttgaagtcaggagtttgagaccagcctggccaacatggtgaaacccccatctctcctgggcatgtagtcccagctactcgggaggctgaggcaggagaatcgcttgaacctgggaggcagaggttgcagtgagctgagatcacaccactgcacttcatcctaggcaacagagcgagactctgtctcccccctcaaaaaaaaaaaagaaagaaagaaagagaaaaaaaaaaaaaaaa

SEQ ID NO: 29 - DNA, 250 bp, Homo sapiens
  SITE (222): n equals a,t,g, or c
  SITE (247): n equals a,t,g, or c
ggcagagccataacagggcaatgctgatgacagcttgtgatctttctgcaattacaaaaccctggcctattcaacaacgggtatgttacttagtgacaataacaataattaaaaagtcaaaataacattctacccagcaatcccactactaggtatctacctaaagaaaaataaatggactatataaaaaagacacttatatgttcatcacatcaccccatnaaacmcccaacccaaaaaaaaaaanaaa

SEQ ID NO: 30 - DNA, 1690 bp, Homo sapiens
gggtcgacccacgcgtccggagagattgtgatggcggctgcgattttagctgagaaggtgccggtggacagcgcagaagagagggagcagcccctggcggctgccgcggaactggctgcccagaagcgcgaacagaggctgcgcaaattccgggagttgcacctgaagcggaatgaagctcgtaaattaaatcaccaggaagttgttgaagaagataaaagacttaagttacctgctaactgggaagccagaaaagctcgtctagaatgggagctacaggaagaagaaaagaagaaggaatgtgcggctagaggggaggactatgagaaagtgaagctgctggagatcagtgcagaagatgcagaaagatgggagaggaagaagaggaggaaaaaccccgacctggggttctcagattatgctgctgcccagttacgccagtatcatcggctgaccaagcagatcaaacctgacatggaaacctatgagagactgagagaaaaacatggagaagagtttttcccaacatccaacagccttcttcatggaacacacgtgccttccacagaagaggttgacaggatggtcatggatctggaaaaacaaattgaaaaacgagacaagtatagccggagacgtccttataatgatgatgcagacatcgactacattaatgaaaggaatgccaaattcaacaagaaggcagaaaggttctatgggaaatatacagctgaaattaaacagaatttggaaagaggaacagcagtgtaatccctttagaaactgttttcagaagctttgagaatgctgggaaattgaagttctcttcagatttctaccaggaaaccaggactcctgtctactatgccttcccactcagcatttagaaataaatgttttttcttaaatgtacacttccatgtatatttccgcatttctgtgcttggatataagatgtattttaagaggtagtgtactttgtaaaaaatctactttgtatgaatactaattatttttctatgtattttaaatgggtaggattatttaatctttgaagcatcttgggcttaagattgttggcatcatacataaatgcagtcattgttgctttgaatgttaggaatttgacgaaagctagagctggactcaacaactttttgaggttatagactcggaagctaagtatagcaaggaggaacatggccgtggctactggtgggctgtttctctctacccatggccttttatgaccaagttcaggaagcagcagaactatcttcctgtgattattgaccatgtacagttccttttataaaaagcagatagagaatccctatgaagcactagcatttaaaacaagaatttatatatttgtatatatatattatgcaagatatgtgctttcattgaataaacattaaaatttttttgattatggggaagtcaaaacagtcaaaagaagactgagtacaatgaatcccatatacccaatacctgtcttcagtaatcaactcttggccagtcttgtttcatcttcatttctatctcctttcccctccatgagtcccatgttattttgaagcaaatattaaatgtataattttgcctatcagtaactgaaagataagaccactatactattatacaacgatattttaataaaaaagtccagagagaaaaaaaaaaaaaa

SEQ ID NO: 31 - DNA, 1363 bp, Homo sapiens
ggcacgagtccaagtgatcgaagccaactaccactcttccaatgcctaccacaactccacccatgctgccgacgtcctgcacgccaccgctttctttcttggaaaggaaagagtaaagggaagcctcgatcagttggatgaggtggcagccctcattgctgccacagtccatgacgtggatcacccgggaaggaccaactctttcctctgcaatgcaggcagtgagcttgctgtgctctacaatgacactgctgttctggagagtcaccacaccgccctggccttccagctcacggtcaaggacaccaaatgcaacattttcaagaatattgacaggaaccattatcgaacgctgcgccagggctattattgacatggttttggcaacagagatgacaaaacactttgaacatgtgaataagtttgtgaacagcatcaacaagccaatggcagctgagattgaaggcagcgactgtgaatgcaaccctgctgggaagaacttccctgaaaaccaaatcctgatcaaacgcatgatgattaagtgtgctgacgtggccaacccatgccgccccttggacctgtgcattgaatgggctgggaggatctctgaggagtattttgcacagactgatgaagagaagagacagggactacctgtggtgatgccagtgtttgaccggaatacctgtagcatccccaagtctcagatctctttcattgactacttcataacagacatgtttgatgcttgggatgcctttgcacatctgccagccctgatgcaacatttggctgacaactacaaacactggaagacactagatgacctaaagtgcaaaagtttgaggcttccatctgacagctaaagccaagccacagagggggcctcttgaccgacaaaggacactgtgaatcacagtagcgtaaacgagaggccttcctttctaatgacaatgacaggtattggtgaaggagctaatgtttaatatttgaccttgaatcattcaagtccccaaatttcattcttagaaagttatgttccatgaagaaaaatatatgttcttttgaatacttaatgacagaacaaatacttggcaaactcctttgctctgctgtcatcctgtgtacccttgtcaatccatggagctggttcactgtaactagcaggccacaggaagcaaagccttggtgcctgtgagctcatctcccaggatggtgactaagtagcttagctagtgatcagctcatcctttaccataaaagtcatcattgctgtttagcttgactgttttcctcaagaacatcgatctgaaggattcataaggagcttatctgaacagatttatctaaaaaaaaaaaaaaa

SEQ ID NO: 32 - DNA, 1726 bp, Homo sapiens
attccattgaaagctacatgcgaacctggatgtaagtttggtgagtgcgtgggaccaaacaaatgcagatgctttccaggatacaccgggaaaacctgcagtcaaggatacttgacaatgactggggacaattttggttgtcataactggatgtgggaggtactcccggcatctagtgaatggagcccagggatgccgctaaacatcctgcagtgcacaggacagtccccacaacaaataatgatttgtgtcaacggaagttaagaaaccctggcatgaagaaatcttcaataattcagaaagggtccccagtcctataaggaagttgaacaaagagcagtaaatccaattcagctgcccttggagaatggagtttcagagaagactggacacccactccactctaccactcccagcccttgctgccaagcccagagcctccctgccctgtggcagcctgatcaaagtccacgtacatccattaatggtgacaggcctcagccctcaactcatgtctttcccaaaacactcttccaagaaatgaatgtgaatgagtgtggaatgaaaccccggccatgccaacacagatgtgtgaatacacacggaagctacaagtgcttttgcctcagtggccacatgctcatgccagatgctacgtgtgtgaactctaggacatgtgccatgataaactgtcagtacagctgtgaagacacagaagaagggccacagtgcctgtgtccatcctcaggactccgcctggccccaaatggaagagactgtctagatattgatgaatgtgcctctggtaaagtcatctgtccctacaatcgaagatgtgtgaacacatttggaagctactactgcaaatgtcacattggtttcgaactgcaatatatcagtggacgatatgactgtatagatataaatgaatgtactatggatagccatacgtgcagccaccatgccaattgcttcaatacccaagggtccttcaagtgtaaatgcaagcagggatataaaggcaatggacttcggtgttctggtaagtagcatttggtcatggtgtcttagctattcccaatgaagcattctccccatatctccttcctccctctatttctctcctttctttgtcttcctcgccttctccctctcccttactctcactctgtgtgtgtgtgcagtgtttaactctctgcctcagccttctcttctttgctaattggaccacatctccaatactcactgaagttgtaggcactaaacttaaagaacagcaagggtacttaatatctttctggccatgacatacttcaaatactgaacataacatttaaggacaaaagacactgagcaaatttatctatcaggatagactgagttatgatgcagtaacaagcaaacctaaaataacagtggcttaaaaccacaaaggttttttaaccaagtgaatccggacgttttccagaatgcacaaccaaaacaaagtaaggcaaagctgatcttcattaaagtatgattactttatctgtcatcctcaacgctggatccacttgttttaatgtatatagcagagagttccattgttcttgctggtgaattatttaatactttttgttaaaactttaaatttataaaccagacatctaacaataaaatgtcactgctattaataactacagcaacaataaaggtttatttctcactcaaaaaaaaaaaaaaaaaa

SEQ ID NO: 33 - DNA, 634 bp, Homo sapiens
agcggacaagagttatcaaacgctttagccttttcccacggctgcccggctttcttcatttttccctgaacatcacgcaatgtcagatcgagcgccacgccataaccggcaatggctttgcggacatgctcttccgtagcctgacgcagtgtcgcgccaatcaacaccgccagttcgacttcatgatgaactgaaccgaaatcggatgggatcgccaatggctgccgcagatcgcacagtgccgtttctggtttaataaacagcactggctcttcgggcactgcgctgcccatctctttaatatgtttggcatagttactgccaacacagactactttactcaccggataatccagcagcgcaccttgccagttgtgatgttgatacataacgttcccctcaccttatcgtggatatgaaaacccgcgccgacaaagataatgccaccgccggatatcggttatttgttagtgtcgtctgttttctgccccatgacggaaagatgttgcttcagcaaatcttcgggtggtggcggtaactgcaaatagtaaccttgctcggttaatgcctgtttaaccttttcaatatcggcattgaccagtttcttccgcccatccagcggcagaatcatcga

SEQ ID NO: 34 - DNA, 1183 bp, Homo sapiens
ggcacgagccacgattcagtcccctggactgtagataaagaccctttcttgccaggtgctgagacaaccacactatgagaggcactccaggagacgctgatggtggaggaagggccgtctatcaatcaatgtgtaaacctattactgggactattaatgatttgaatcagcaagtgtggacccttcagggtcagaaccttgtggcagttccacgaagtgacagtgtgaccccagtcactgttgctgttatcacatgcaagtatccagaggctcttgagcaaggcagaggggatcccatttatttgggaatccagaatccagaaatgtgtttgtattgtgagaaggttggagaacagcccacattgcagctaaaagagcagaagatcatggatctgtatggccaacccgagcccgtgaaacccttccttttctaccgtgccaagactggtaggacctccacccttgagtctgtggccttcccggactggttcattgcctcctccaagagagaccagcccatcattctgacttcagaacttgggaagtcatacaacactgcctttgaattaaatataaatgactgaactcagcctagaggtggcagcttggtctttgtcttaaagtttctggttcccaatgtgttttcgtctacattttcttagtgtcattttcacgctggtgctgagacaggggcaaggctgctgttatcatctcattttataatgaagaagaagcaattacttcatagcaactgaagaacaggatgtggcctcagaagcaggagagctgggtggtataaggctgtcctctcaagctggtgctgtgtaggccacaaggcatctgcatgagtgactttaagactcaaagaccaaacactgagctttcttctaggggtgggtatgaagatgcttcagagctcatgcgcgttacccacgatggcatgactagcacagagctgatctctgtttctgttttgctttattccctcttgggatgatatcatccagtctttatatgttgccaatatacctcattgtgtgtaatagaaccttcttagcattaagaccttgtaaacaaaaataattcttgtgttaagttaaatcatttttgtcctaattgtaatgtgtaatcttaaagttaaataaactttgtgtatttatataataaaaaaaaaaaaaaaaaa

SEQ ID NO: 35 - DNA, 1882 bp, Homo sapiens
gggcacctgcacagcaatcaaagccgactcctacatttgcctctgtccccttgggtttaaaggtcgacactgtgaagatgctttcaccttgaccattcctcagttcagagagtctctgagatcttacgctgcaactccctggccactggagccccagcattacctttccttcatggaatttgagatcacatttcggccagactcaggagatggtgtcctcctgtacagctatgacacaggcagcaaagacttcctgtccatcaacttggcagggggccacgtggagttccgctttgactgtggctctgggaccggtgtcctcaggagtgaagatcccctcaccctgggcaactggcacgagcttcgtgtatctcgcacagcaaagaatggaatcttacaggtggataagcagaagatagtggagggaatggcagagggaggcttcacacagattaagtgcaacacagacattttcattggcggagtccccaattatgatgatgtgaagaagaactcgggtgtcctgaagcctttcagcgggagcatccagaagatcatcctgaatgaccgaaccatccatgtgaagcatgacttcacctccggagtgaatgtggagaatgcggcccacccctgtgtgagagccccttgtgcccatgggggcagctgccggcccaggaaggagggctatgactgtgactgccccttgggctttgaggggcttcactgccagaaagcgatcatagaagccattgagatcccgcagtttatcggccgcagttacctgacgtatgacaacccagatatcttgaagagggtgtcaggatcaagatcaaatgtgttcatgaggtttaaaacaactgccaaggatggccttttgctgtggaggggagacagccccatgagacccaacagcgacttcatttccttgggccttcgggatggagccctcgtgttcagctataacctgggcagtggtgtggcatccatcatggtgaatggctccttcaacgatggtcggtggcaccgagttaaggccgttagggatggccagtcaggaaagataaccgtggatgactatggagccagaacaggcaaatccccaggcatgatgcggcagcttaacatcaatggagctctgtatgtgggtggaatgaaggaaattgctctgcacactaacaggcaatatatgagagggctcgtgggctgtatctctcacttcaccctgtccaccgattaccacatttccctcgtggaagatgccgtggatgggaaaaacatcaacacttgtggagccaagtaacaccagctggccttgtccaagggacagagccttctattctgagaatcccaggggccctcagaccctgcctgatgctatatgcagaggcccagggaccaggtgtgtttcctctcaccaagaagaaagtacacactgatgagaaactgagaaccaagacaggcatccctgggtggcctttcctgctgacactccacgagctgacccagcagaattctctgtgtaggaagcatcggactttgtccattgaatatgtagcggctgccagagatcacacatcaatgcaaattccagagcctgtctgctatagctcagtgactgtgttgtgattcatagtacattaaaaagagagagagagagaaagaatcccacagggcactattaaaatacttctctccttccctgactcatgacactcttcctgacagcagaatgactgtgtgaccttgaacttcacatttcccacattggcccttggattgttcggattaaccccttccactcctcactggctggttcactgtgttctgactagtccataaaaataaagatggaaggagatcaaaaaaaaaaaaaaaaaaaaaa

SEQ ID NO: 36 - DNA, 1150 bp, Homo sapiens
ggcacgagacacgaggctgcttcgctgcacacccgagaaagtttcagccaaacttcgggcggctgaggcggcggccgaggagcggcggactccgggcgcggggagtcgaggcatttgcgcctgggcttcggagcgtagcgccagggcctgagcctttgaagcaggaggaggggaggagagagtggggctcctctatcgggaccccctccccatgtggatctgcccaggcggcggcggcggaggaggcgaccgagaagatgcccgcctgcgccccgctctgctgtgggcgctgctggcgctctggctgtgctgcgcgacccccgcgcatgcattgcagtgtcgagatggctatgaaccctgtgtaaatgaaggaatgtgtgttacctaccacaatggcacaggatactgcaaatgtccagaaggcttcttgggggaatattgtcaacatcgagacccctgtgagaagaaccgctgccagaatggtgggacttgtgtggcccaggccatgctggggaaagccacgtgccgatgtgcctcagggtttacaggagaggactgccagtactcgacatctcatccatgctttgtgtctcgaccttgcctgaatggcggcacatgccatatgctcagccgggatacctatgagtgcacctgtcaagtcgggtttacaggtaaggagtgccaatggaccgatgcctgcctgtctcatccctgtgcaaatggaagtacctgtaccactgtggccaaccagttctcctgcaaatgcctcacaggcttcacagggcagaagtgtgagactgatgtcaatgagtgtgacattccaggacactgccagcatggtggcacctgcctcaacctgcctggttcctaccagtgccagtgccttcagggcttcacaggccagtactgtgacagcctgtatgtgccctgtgcaccctcgccttgtgtcaatggaggcacctgtcggcagactggtgacttcacttttgagtgcaactgccttccagaaacagtgagaagaggaacagagctctgggaaagagacagggaagtctggaatggaaaagaacacgatgagaattagacactggaaaatatgtatgtgtggttaataaagtgctttaaactgaaaaaaaaaaaaaaaaaaaaa

SEQ ID NO: 37 - DNA, 1488 bp, Homo sapiens
ccacgcgtccgagaagctaccaagatcaacctctccctttccgctttgggtaatgtcatctctgctctagtggacggcaaaagcactcacattccatatcgggactcaaagcttaccaggctcctccaagattcccttggtggcaatgccaagactgtgatggtggccaacgtggggcctgcctcttacaacgtagaagagactctgaccactctgcgatatgccaaccgtgccaaaaacattaagaacaaaccaagggtcaatgaggaccccaaggatgccctccttcgagaattccaggaagagattgctcggctcaaggcccagctggaaaaacggtccattggtaggaggaagaggcgagagaagcggagggaaggtggtggcagtggtgggggtggggaagaggaggaggaggagggagaagagggtgaggaggaaggggatgataaggatgattactggcgggaacagcaagaaaaactggagattgagaagcgggccattgtagaggatcacagcttggttgcagaggagaagatgaggctgctgaaggagaaagagaaaaagatggaggcctgcggcgggagaaggatgctgccgagatgctgggcgccaagatcaaggccatggagagtaagttgcttgttggaggaaaaaatatagtagatcatacgaatgaacagcagaaaatcctggagcagaaacgacaggaaattgcagagcagaaacgtcgagaaagagaaatccagcaacagatggaaagtcgagatgaggagaccttggaacttaaagagacatacagctcattgcagcaagaggtggacatcaagaccaaaaaactcaaaaagctcttctccaagcttcaggcagtgaaggctgagatccatgacctccaagaagaacacatcaaggagcgccaagagctagagcagactcagaatgagctcaccagggagctgaaactcaagcatcttattatagaaaactttatccctctggaagaaaaaagtaaaattatgaatagagccttctttgatgaagaggaagatcattggaaactacatcctataaccagactggagaaccagcagatgatgaagcggccagtctcagccgtgggatataagagaccattgagccagcacgcaagaatgtccatgatgattcgtccagaggcccgatatagggcagaaaacattgtgctgttagagctggacatgcccagccggaccaccagagactatgagggtccagccattgcccccaaggtccaggctgcattggatgcggctctgcaggatgaagatgagatacaggtggatgcatcatcatttgaaagcactgcaaataagaaatccaaggccaggcctaaaagtggaaggaagtcgggatcctcctcctcttcctcaggaacccctgcatctcagctttatccacagtctcgggggctggttccaaagtaaagccagcttctcctctcccagg

SEQ ID NO: 38 - DNA, 781 bp, Homo sapiens
ggaacatctccttctccccaaaccacagttgtttccacggctgaagacttggctcccaaatctgccacctttgctgttcagagcagcacacagtcaccaacaacactgtcctcttcagcctcagtcaacagctgtgctgtgaacccttgtcttcacaatggcgaatgcgtcgcagacaacaccagccgtggctaccactgcaggtgcccgccttcctggcaaggggatgattgcagtgtggatgtgaatgagtgcctgtcgaacccctgcccatccacagccacgtggcaacaatactcagggatcctttatctgcaaatgcccggttgggtaccagttggaaaaagggatatgcaatttgggtaagagacttagtctatttcggactttattccgtaccacaatatattttacaaggtaacatttgttatttttcttcctaaccaaaatcagtatttgtccaaggtataaacttaaggaatatagaaaaaagtggaagctattgtccattattctgatacttggagatagaacaccctactttgcattatgtttttgatgtgcagtatatttttacatagttgaaatcataggatatctgtataaactttatatcttaaacattttcctgtgttgttaaaaacattgtacaaacatcttaatgacggcatattatgccatcatttgtgtataatattatttgcttaaccactccaccctggagctaggaaaaaaaaagtcaaaaggattattctgaccacataataaaaaaaaaaaaaaa

SEQ ID NO: 39 - DNA, 2456 bp, Homo sapiens
gggatcattcccatatagaagaagcagccatggatggtacactgagaaggattttagtacaaaagaacttacagagacccacaggtttggctgtggattattttagtgaacgcatatattgggctgactttgagctctccatcattggcagtgttctgtatgatggctctaattcagtagtctctgtcagcagcaaacaaggtttattacatccacataggatcgatatctttgaagattatatatatggagcaggacctaaaaatggtgtatttcgagttcaaaaatttggccatggttcagtagagtacttagctttaaatattgataaaacaaaaggtgttttgatatctcatcgttataaacaactagatttacccaatccatgcttggatttagcatgcgaatttctttgcttgctaaatccttctggggccacttgtgtgtgtccagaaggaaaatatttgattaatggcacctgcaatgatgacagcctgttagatgattcatgtaagttaacttgtgaaaatggaggaagatgcattttaaatgagaaaggtgatttgaggtgtcactgttggcccagttattcaggagaaagatgtgaagtcaaccactgtagcaactactgccagaatggaggaacttgcgtaccatcagttctagggagacccacctgcagctgtgcactgggtttcactgggccaaactgtggtaagacagtctgtgaggatttttgtcaaaatggaggaacctgcattgtgactgctggaaaccagccttactgccactgccagccggaatacaccggagacagatgtcagtactacgtgtgccaccactattgtgtgaattctgaatcatgtaccattggggatgatggaagtgttgaatgtgtctgtccaacacgctatgaaggaccaaaatgtgaggttgacaagtgtgtaaggtgccatggggggcactgcattataaataaagacagtgaagatatattttgcaactgcactaatggaaagattgcctctagctgtcagttatgtgatggctactgttacaatggtggcacatgccagctggaccccgagacaaatgtacctgtgtgtctatgctccaccaactggtcaggcacacagtgtgaaaggccagccccaaagagcagcaagtctgatcatatcagcacaagaagcattgccatcattgtgcctctcgtcctcttggtgactttgataaccaccttagtaattggtttagtgctttgtaaaagaaaaagaaggacaaaaacaattagaagacaacctattatcaatggaggaataaatgtagaaattggcaatccatcttataacatgtatgaggtagatcatgatcacaacgatggaggtcttttagatcctggctttatgatagacccaacaaaggccaggtacatagggggaggacccagtgctttcaagcttccacacacagcgccgcccatctacctaaactctgatttgaaaggaccactaactgctgggccaacaaattactccaatccggtatatgcaaaattatatatggatgggcaaaactgtcgaaactccttaggaagtgttgatgaaaggaaagaactgcttccaaagaaaatagaaattggtataagagagacagtggcataatcagtgatatcttttatatgctgtataaatgtataaaatataaggattacttttgtatgttccaacagtattatacttgttttggcatcagcattacctctttctttatctttttcctgggtaattgtttctgagttttttgggttttattttttgctgatgactattgattgaccatttgtatggtatttatatgaaaaagaactgcactacagtacaatttacaacaatgctgctgatatgacacacctttgaatttgttaaaattaaaaaaacgtattcctttgtagtgtgaatatgagcaatctattttatatgaacttttttggttgtacttaatcaacgaggagaatctctgcacttttccattatacggtttgaaggctgtaatacagtgtcattttatttttctgtttaaattgatggaaaaatgattgaatgtcaactctcttctttgtgcccataaagatcgattcagactctgctgaaaatatatagctctcacaagttcagcatcacctgctttgaaattagccttagattgccaaccaatagatgagaattttgaggaaaaaaattaaacaatatgtaaaattaataatttgcatgaacacagatgactacattttccaaaacttagtggactctatgtgatgtactaaatgtatacaccttgtaagcaatagttatatttaggtggtagaacatagcaaaaatataaccgaaagttggccgactgcacttgctatggaataagaccttttattctccctcagtctcgagagtacttctaga

SEQ ID NO: 40 - DNA, 1788 bp, Homo sapiens
ctcgaaattaaccctactaaagggaacaaaagctggagctccaccgcggtggcggccgctctagaactagtggatcccccgggctgcaggaattcggcacgagcgccagcgagggcgagccctgtggcggccctctggactcgccttgcggcgagagcctggagtgcgtgcgcggcctatgccgctgccgctggtcgcacgccgtgtgtggcaccgacgggcacacctatgccaacgtgtgcgcgctgcaggcggccagccgccgcgcgctgcagctctccgggacgcccgtgcgccagctgcagaagggcgcctgcccgttgggtctccaccagctgagcagcccgcgctacaagttcaacttcattgctgacgtggtggagaagatcgcaccagccgtggtccacatagagctcttcctgagacacccgctgtttggccgcaacgtgcccctgtccagcggttctggcttcatcatgtcagaggccggcctgatcatcaccaatgcccacgtggtgtccagcaacagtgctgccccgggcaggcagcagctcaaggtgcagctacagaatggggactcctatgaggccaccatcaaagacatcgacaagaagtcggacattgccaccatcaagatccatcccaagaaaaagctccctgtgttgttgctgggtcactcggccgacctgcggcctggggagtttgtggtggccatcggcagtcccttcgccctacagaacacagtgacaasgggcatcgtcagcactgcccagcgggagggcagggagctgggcctccgggactccgacatggrctacatccagacggatgccatcatcaactacgggaactccgggggaccactggtgaacctggatggcgaggtcattggcatcaacacgctcaaggtcacggctggcatctcctttgccatcccctcagaccgcatcacacggttcctcacagagttccaagacaagcagatcaaagccccctcactggcagttcattgagagcagggggcttcctcacgtttccccctcctccatgaccccgtcagccaagcacatggaccccagtgcagccaaggctggtgccatgagggctggtcacatgaagagctgctgttgaggatgccgccattgttcttctgtgtccattatgggaagacaatctggagccaggcagagcctgtctttcccaaagaagctgaagtcttcttctcttgaacagtggggamcatctaatctcttgagcccttttcctgttggcttctaggaagctcagagctagattcaggggtgcacccagacctgtcctagcatgctcctttccctaatgaccgagtctttcctgttgaattatcccattctccatgggtgcctttgactttggcctccttactggaaattagcggagctgctgtttgcacacactgagctgtgaggtggctttccttggaagtggatgatagtgtcctcttcccttcttgcctctctctttctcctgagacaggatccccctggggcctaggtttgctcctttgttgtacaggggctgtcccagttagtgctgacctcatcccagaaccccctgggaaatatcccctgtcctcagagctgtgtcccctccccaaggacagtgcagactaactgaggagcctgataaaccttagctgcatggcacacttgcaattttaaaatccttctgaagttgactggtgtttgtacttgcttctcttttttatttaataaaatccaatgatccaaacccaaaaaaaaaaaaaaa

SEQ ID NO: 41 - DNA, 773 bp, Homo sapiens
  SITE (30): n equals a,t,g, or c
  SITE (632): n equals a,t,g, or c
  SITE (666): n equals a,t,g, or c
  SITE (714): n equals a,t,g, or c
  SITE (727): n equals a,t,g, or c
  SITE (755): n equals a,t,g, or c
  SITE (770): n equals a,t,g, or c
agggcccccctttttttttttttttttttntttttgttttttttttttttttttttttttttttttttttttttttttttttttttttttttttttttttttttttttttttttttttttttttacagcgtcttttcatttttattactcaaaaaagtttcatttttttatttagctttctgactctgtgcttgtgccttcaacactttcacaacgattttctgctcctcgataaggaaagcacgcttgatcctgtcacgaacacatttagcacacatggaaccaccataggccctgctgacatgtttctttgttttggacaatctcataagaactttaggtcttacagcacgaacccctcgaagtctgcctgggcacacaccacatgcagattttggtgctttcccaaccttcttggtataaaggtaaacaattctattaccaggggttcgggacagcctagttttgttagaggctgtattgtaggaaagcctacgtcggtatgtcaaacgctggaccattctgagtgcctgcagacrcgtgggcggacgcgtgggtcgacccgggaattccgggaccggtacctgcaggcgtaccagctttccctatagtgagtcgtattagagcttggnggtaatcaatggtcataagctgttcctagtgtgnaaatgttaatccggtcaacaaatttcccaccaccaaacataacggaanccgggaagccatnaaaagtggtaaaaacccttggggggtgnccctaaatgaagtgnagc

SEQ ID NO: 42 - DNA, 1170 bp, Homo sapiens
gggcagacagaagaatgtggagtggatcgaggggatgtcgggaggacctcccagggtggcccctgcatagtgggacttgagactggacaaggagcagcccccagtggttaggactgaggagggggatgggatttttctccaaggaaacacccttctcaagtactcttgtccctgcccaggagacacccaggtcctttgaatgcacctgcccgcgtgggttctacgggctgcggtgtgaggtgagcggggtgacatgtgcagatggaccctgcttcaacggcggcttgtgtgtcgggggtgcagaccctgactctgcctacatctgccactgcccacccggtttccaaggctccaactgtgagaagagggtggaccggtgcagcctgcagccatgccgcaatggtgaggcctggaggcctgaacggcgagggatggggtgggggtcctggatggctcagacagtccagggttggaatcctggctttgactcttctaaccctagggcctggggacctgaccttccacctgcaagcctgtaaaatgggcaaggagacattccctatctcataactattaatatttactgagaatttactgtgtgccaggccctattctaggcactgaggatacagcagggaatgaaacagacaaagtccctggccctgcctgatagagctgaggtgcctggtgtgctgaggataagcagggaagccagtgtggttatactgagatgaggtcagggaggtgactgaggcacatcttgtgggaccccctgggtcacaagaaggggaactttcacttttcccctgagtgagatggagccacaggaaggttctgaggagagaagagacctgatatcggtgctaaaagattaaatgcggcccggcacggcgactcacgcctgtaattccagcactttgggaggccgaggcgggcagatcacctgagctcaggagttggagaccagcccgggccacatggtgaaaccccgtctctactaaaaatacaaaaaattagccgggcgtgatggcaggtgcttgtaatcccagctactcgggaggctaaggcggaagaatcacttgaacccgggaggcggaggttgcagtgagccgagatcatgccactgcgctcccgcctgggcgacagagtgacactctgtctcaaaaaaaa

SEQ ID NO: 43 - DNA, 694 bp, Homo sapiens
cccacgcgtccgcgagccgctcagtctccctgctctccgtggtcccggctcgcgtgtagcggcggcggcggcgtctccgtgaggaggcgcgcggggccatgacgtcagcgtccacaaaggtcggagagatcttctcggcggccggcgccgccttcacgaagctcggggagctgacgatgcagctgcatcccgtggccgactcttctcctgcgggggcccagataaaggccactgtgaaacgcaaggtatatgaagattctggcatcccccttccagctgagtcacccaagaaagggcccaagaaggtggcatctggtgtcttgtcacctcctccagctgcccctcctcccagcagctccagtgtccctgaggccgggggtccccccataaagaaacagaaggctgcctgaccctggattctggccttctcatgacctctgctgatcctcctctcctctcctgctgagccttccacctctgacctctcactgttcatgccggacctgtggatctcctgggactccgagcaaggcctgcacgagagagggctgaaaggctgctggggctgccacctcgctattcccgcataagcatctgcccccaacccctttgaccttcatctgatggacatttttatacagaaaacaataaagatttccctctcaaaaaaaaaaaaaaaaaaaaaaaaaaaaaa

SEQ ID NO: 44 - DNA, 1565 bp, Homo sapiens
aattcggcacgagggatggtcacgtgtctcctgccgctgcactgagggcttccggctggcagcagacgggcgcagttgcgaggacccctgtgcccaggctccgtgcgagcagcagtgtgagcccggtgggccacaaggctacagctgccactgtcgcctgggtttccggcagcggaggatgatccgcaccgctgtgtggacacagatgagtgccagattgccggtgtgtgccagcagatgtgtgtcaactacgttggtggcttcgagtgttattgtagcgagggacatgagctggaggctgatggcatcagctgcagccctgcaggggccatgggtgcccaggcttcccaggacctcggagatgagttgctggatgacggggaggatgaggaagatgaagacgaggcctggaaggccttcaacggtggctggacggagatgcctgggatcctgtggatggagcctacgcagccgcctgactttgccctggcctatagaccgagcttcccagaggacagagagccacagataccctacccggagcccacctggccacccccgctcagtgcccccagggtcccctaccactcctcagtgctctccgtcacccggcctgtggtggtctctgccacgcatcccacactgccttctgcccaccagcctcctgtgatccctgccacacacccagctctctcctgtgatcccccacacacccagctttgtcccctgaccaccagatccccgtggtggcagccaactatccagatctgccttctgcctaccaacccggtattctcctgtctctcattcagcacagcctcctctgccacccagcccgcagccctccccaccctcctgccctctcagagccccactaaccagacctcacccatcagccctacacatccccattccaaagccccccaaatcccaagggaagatggccccagtcccaagttggccctgtggctgccctcaccagctcccacagcagccccaacagccctgggggaggctggtcttgccgagcacagccagagggatgaccggtggctgctggtggcactcctggtgccaacgtgtgtcttttttggtggtcctgcttgcactgggcatcgtgtactgcacccgctgtggcccccatgcacccaacaagcgcatcactgactgctatcgctgggtcatccatgctgggagcaagagcccaacagaacccatgccccccaggggcagcctcacaggggtgcagacctgcagaaccagcgtgtgatggggtgcagacccccctcatggagtatggggcgctggacacatggccggggctgcaccagggacccatgggggctgcccagctggacagatggcttcctgctccccaggcccagccagggtcctctctcaaccactagacttggcttctcaggaactctgcttcctgggcccagcgctcggtgaccaaaggataacaccaaagccccttaagacctcagggggcgggtggctggggtcttctccaataaaatggggtgtcaaccttacccaagaaaaaaaaaaaaaaaaaaaaa

SEQ ID NO: 45 - DNA, 724 bp, Homo sapiens
ccgggtcgacccacgcgtccgaacgaatgcatcccccacaatggctgtcgccacggcacctgcagcactccctggcaatgtacttgtgatgagggctggggaggcctgttttgtgaccaagatctcaactactgcacccaccactccccatgcaagaatggggcaacgtgctccaacagtgggcagcgaagctacacctgcacctgtcgcccaggctacactggtgtggactgtgagctggagctcagcgagtgtgacagcaacccctgtcgcaatggaggcagctgtaaggaccaggaggatggctaccactgcctgtgtcctccgggctactatggcctgcattgtgaacacagcaccttgagctgcgccgactccccctgcttcaatgggggctcctgccgggagcgcaaccgggggccaactatgcttgtgaatgtccccccaacttcaccggctccaactgcgagaagaaagtggacaggtgcaccagcaacccctgtgccaacgggggacagtgcctgaaccgaggtccaagccgcatgtgccgctgccgtcctggattcacgggcacctactgtgaactccacgtcagcgactgtgcccgtaacccttgcgcccacggtggcacttgccatgacctggagaatgggctcatgtgcacctgccctgccggcttctctggccgacgctgtgaggtgcggacatccatcgatgcctgtgc

SEQ ID NO: 46 - DNA, 533 bp, Homo sapiens
tcgacccacgcgtccggtagatctggacgtttcatcacatattcccaggaaagcccagccaaatgcagctggcactgtgccagacattgggctagatgctgggaattgaaataataaactatttcctgatttctcttctctcttctggagaaagaattggattagaacaagcattgcagtgtcgagatggctatgaaccctgtgtaaatgaaggaatgtgtgttacctaccacaatggcacaggatactgcaaatgtccagaaggcttcttgggggaatattgtcaacatcgagacccctgtgagaagaaccgctgccagaatggtgggacttgtgtcaatggaggcacctgtcggcagactggtgacttcacttttgagtgcaactgccttccagaaacagtgagaagaggaacagagctctgggaaagagacagggaagtctggaatggaaaagaacacgatgagaattagacactggaaaatatgtatgtgtggttaataaagtgctttaaactgaaaaaaaaaaaaaaa

SEQ ID NO: 47 - DNA, 2411 bp, Homo sapiens
gagaaaggtgaactccttttctcaagcacttctgctctcctctaccagaatcactcagaatgcttcccgggtgtatattcttgatgattttactcattcctcaggttaaagaaaagttcatccttggagtagagggtcaacaactggttcgtcctaaaaagcttcctctgatacagaagcgagatactggacacacccatgatgatgacatactgaaaacgtatgaagaagaattgttgtatgaaataaaactaaatagaaaaaccttagtccttcatcttctaagatccagggagttcctaggctcaaattacagtgaaacattctactccatgaaaggagaagcgttcaccaggcatcctcagatcatggatcattgtttttaccaaggatccatagtacacgaatatgattcagctgccagtatcagtacgtgtaatggtctaaggggattcttcagaataaacgaccaaagatacctcattgaaccagtgaaatactcagatgagggagaacatttggtgttcaaatataacctgagggtgccgtatggtgccaattattcctgtacagagcttaattttaccagaaaaactgttccaggggataatgaatctgaagaagactccaaaataaaaggcatccatgatgaaaagtatgttgaattgttcattgttgctgatgatactgtgtatcgcagaaatggtcatcctcacaataaactaaggaaccgaatttggggaatggtcaattttgtcaacatgatttataaaaccttaaacatccatatgacgttggttggcattgaaatatggacacatgaagataaaatagaactatattcaaatatagaaactaccttattgcgtttttcattttggcaagaaaagatccttaaaacacggaaggattttgatcatgttgtattactcagtgggaagtggctctactcacatgtgcaaggaatttcttatccagggggtatgtgcctgccctattattccaccagtatcattaaggatcttttacctgacacaaacataattgcaaacagaatggcacatcaactggggcataaccttgggatgcagcatgacgagttcccatgcacctgtccttcaggaaaatgcgtgatggacagtgatggaagcattcctgcactgaaattcagtaaatgcagccaaaaccaataccaccagtacttgaaggattataagccaacatgcatgctcaacattccatttccttacaattttcatgatttccaattttgtggaaacaagaagttggatgagggtgaagagtgtgactgtggccctgctcaggagtgtactaatccttgctgtgatgcacacacatgtgtactgaagccaggatttacttgtgcagaaggagaatgctgtgaatcttgtcagataaaaaaagcagggtccatatgcagaccggcgaaagatgaatgtgattttcctgagatgtgcactggccactcgcctgcctgtcctaaggaccagttcagggtcaatggatttccttgcaagaactcagaaggctactgtttcatggggaaatgtccaactcgtgaggatcagtgctctgaactatttgatgatgaggcaatagagagtcatgatatctgctacaagatgaatacaaaaggaaataaatttggatactgcaaaaacaaggaaaacagatttcttccctgtgaggagaaagatgtcagatgtggaaagatctactgcactggaggggagctttcctctctccttggagaagacaagacttatcaccttaaggatccccagaagaatgctactgtcaaatgcaaaactatttttttataccatgattctacagacattggcctggtggcgtcaggaacaaaatgtggagagggaatggtgtgcaacaatggtgaatgtctaaacatggaaaaggtctatatctcaaccaattgcccctctcagtgccatgaaaatcctgtggatggccacggactccagtgccactgtgaggaaggacaggcacctgtagcctgtgaagaaaccttacatgttaccaatatcaccatcttggttgttgtgcttgtccaaaattaaggaacaaccacatcttcatattctcctgaacactgcatatgtgaatgaacaaagcacattttgatgatatcgtatttcctttataaaaaggatcacctttctgattcattatttttgtatttcctccatatcactttcagacaacatcacctctccccattgcttctgtcttgggctccatatttaactagctgctactttctggkgaattttttctaagttcttctctctccaataataaacatgkcttgtacccccaaaaaaaaaaaaaaaaaaaaaaaaaaaaaaaaaaaaaaaaaaaaaaaaaaaaaa

SEQ ID NO: 48 - DNA, 2020 bp, Homo sapiens
ggcacgaggcgctatgacggccagcgcacagccgcgcgggcggcggccaggagtcggagtcggagtcgtggtgaccagctgcaagcatccgcgttgcgtcctcctggggaagaggaaaggctcggttggagctggcagtttccaactccctggaggtcatctggagttcggtgaaacctgggaagaatgtgctcaaagggaaacctgggaagaagcagctcttcacctgaaaaatgttcactttgcctcagttgtgaattctttcattgagaaggagaattaccattatgttactatattaatgaaaggagaagtggatgtgactcatgattcagaaccaaagaatgtagagcctgaaaaaaatgaaagttgggagtgggttccttgggaagaactacctcccctggaccagcttttctggggactgcgttgtttaaaagaacaaggctatgatccatttaaagaagatctgaaccatctggtgggatacaaaggaaatcatctctaggtggccgagaagatttgattttctttaaaaagacaagaataaggtctggttagggaatgaaaaatgtatacatttcggaacaactccattttatctaaaaaagttcttgtgattgccagtttatttgcagtctcttaatgtatcccccactctttcagccagtacttgagaaaatttttctgaaatatgtcattgaattgtattccagacacagaatacatgataaatactgatattatgggtaatctgctttccatatttacctatgatatttactgtgcagtttgtcattactagcttgcatggagtaggatgcagtcaaatttgccttagtgtttctgttcaaatagagacctgaattcaaatattgtagtttaggttcaaacagagtatggctgttgcaaaatttaccaaatttgttgattacctcttttattaaagaaatgttggggagagggtaatatattgtgacaatttttgcaacttacagggaataggacaggtcattagggtgtatttcccaggtttccaattgagaatctaaaccaagagaagtgagacaaaccatctaatatctgtatcatgctattaataggctgtgatgttgagtttctcacttactctttctgaggtccagggtccttatatgaagagattcatatatatgaagagattcgtctagagcagtggttgtcaaagtgtggtctgggggggcctcaagagcctttcaagggtattctaggtcaaagctgtttttataacactaagacatcatttcactatttatagcttttccttttttttatttgagaaggagtcttgctctgttgcccacattggagtgcagtggcacgatctcagctcattgcagcctccgccacctgggttcaagcaattctcctacctcagcttcccgagtagctgggattataggcacccaccaccacacctggctaatttttgtatttttagtggagacggggtttcaccatgttggccaggctggtctggaactcctgagctcaagtgatctgcccatctcagcctcccaaagtgctgggattacaggtatgagccacaacgcccagccatcatttatctttttcactcattttttcatgagtatgcagaggagttttcaagaggctatctggtgtgatattgtaataggctgaatgcaaaagcagatacaagattccagctttcgtctgtcatcagacattgaagagatttggagaaatgtaaagcagcagtactcttctcactaatttttgttgtggttagttagaaaaatggttatttttagtgggttttaatatgtgaaaaaaataaaattagctatttgccaaaaatgtttttatgtgtttatatatacttggttcttgttacttgcaaatgattaataaaaattttaagaaatttctcagttttcatttctatatgataaatatttctagataaaaccatacaaaaacaaaaaaaaaaaaaaaaaaaaaaaaaaaaaaaaaaaaa

SEQ ID NO: 49 - DNA, 1892 bp, Homo sapiens
ctgtgttgatggtgtggctggctatcgttgcacatgtgtgaaaggatttgtaggcctgcattgtgaaacagaagtcaatgaatgccagtcaaacccatgcttaaataatgcagtctgtgaagaccaggttgggggattcatgtgcaaatgcccacctggatttttgggtacccgatgtggaaagaacgtcgatgagtgtctcagtcagccatgcaaaaatggagctacctgtaaagacggtgccaatagcttcagatgcctgtgtgcagctggcttcacaggatcacactgtgaattgaacatcaatgaatgtcagtctaatccatgtagaaatcaggccacctgtgtggatgaattaaattcatacagttgtaaatgtcagccaggattttcaggccaaaggtgtgaaacagaacagtctacaggctttaacctggattttgaagtttctggcatctatggatatgtcatgctagatggcatgctcccatctctccatgctctaacctgtaccttctggatgaaatcctctgacgacatgaactatggaacaccaatctcctatgcagttgataacggcagcgacaataccttgctcctgactgattataacggctgggttctttatgtgaatggcagggaaaagataacaaactgtccctcggtgaatgatggcagatggcatcatattgcaatcacttggacaagtgccaatggcatctggaaagtctatatcgatgggaaattatctgacggtggtgctggcctctctgttggtttgcccatacctggtatgttttaacaaaatgagtataattctgttggactctagaggtgatgctgcttaaatggacatcaggtttgctagcattgttgttcttggtttcaaacaaagattaacagctatctctctcatttcctactccctgattatcctaactgtgggttattagaagcttttttcctaagtaagctgtttgcctctctgtgtgagaaatgcctttgaagatctacattaagactaccaagaagcatgctgaactagcagctggttgctaaactgtcttctaaggagattaattactggtattttttgtttattttaaggattgttttgttttgtaatcagtatataagcaggaccactgctatccatcttttatggcccttttcaaatagatcttggcttgtcttctaaaaaatactttttaataaatatcccaggagttttagtttgaagaattgcaaactaaatttcattaggtgacccaggttctcagcattgtacatggcaataagcttgttctatctggatacatctatagaagtatatgcatatgacattattttttactttgctcatttgtttcaggtatactaaaagaaaattaaatagacaaaaatgaattaaagtattagaaactgactaatacattctagaagtaagttgtatgaaactaggatacgtatactaataaatatagcacaaaaatactaaacttcataaaaatgcggtgagatgacccttgcgaagcctcaaatacaatacttattttatttattagaaattattggccaggtacggtggctcacgcctgtaatcccagcactttggaaggctgaggagggtggatcacgaggtcaggagttggagaccgccctggacaatatggtgaagccctatctctactaaaaaacgcacagaaaaattagccaggcatggtggtagatgcctgtaattccagctactcaggaggctgaggcaggagaatcgcttgaacccaggaggcgaagattgccgtgagccgagatcatgccactgcactccagcctgggcaatggagagaggctctgtctcaaaaaaaaaaaaaaaaaaaaaaaaaaaaaaaaaa

SEQ ID NO: 50 - DNA, 852 bp, Homo sapiens
  SITE (2): n equals a,t,g, or c
  SITE (816): n equals a,t,g, or c
anagttcgccmgctygaaattaaccctactaaagggaacaaaagctggagctccaccgcggtggcggccgctctagaactagtggatcccccgggctgcaggaattcggcacgagctggcacggactatgtgttgaaggaccattcccgctgcactgtgacgggctggggactttccaaggctgacggcatgtggcctcagttccggaccattcaggagaaggaagtcatcatcctgaacaacaaagagtgtgacaatttctaccacaacttcaccaaaatccccactctggttcagatcatcaagtcccagatgatgtgtgcggaggacacccacagggagaagttctgctatgagctaactggagagcccttggtctgctccatggagggcacgtggtacctggtgggattggtgagctggggtgcaggctgccagaagagcgaggccccacccatctacctacaggtctcctcctaccaacactggatctgggactgcctcaacgggcaggccctggccctgccagccccatccaggaccctgctcctggcactcccactgcccctcagcctccttgctgccctctgactctgtgtgccctccctcacttgtgggccccccttgcctccgtgcccaggttgctgtgggtgcagctgtcacagccctgagagtcagggtggagatgaggtgctcaattaaacattactgttttccatgaaaaaaaaaaaaaaaaaactcgagggggggcccrgtacccaattcgccctatagtgagtcggattacaattcactgggccgcgttttacaacgtcngactgggaaaaccctgcgttacccaacttaatcgcc

SEQ ID NO: 51 - DNA, 951 bp, Homo sapiens
tttttttttttttttttttttttttttttttttttttttttttttttttttacaaagatagggtcatttattcacgttatattatttaattttaaaggcaaaaatacagttctgttttgaacaccaagatcagacacagccccctacacaatggtaaatacacacatttgcatacacaggaaatcaaaatacacagcacaacaggtctctgggacatgaaagccgtcgcccgactgcctgtcggccgagggcgagctgcgctgccgccggctgctggcaggggccacggcccggctccgcgcgcggcccgcgtcggccgcggtgctcgtgccgctctgctcagtgcgtggggtcccggcgctgctgtacacgctgcggtccagccgcctgaccgggaggcacaagggcgacgtcagtttcccaggcggcaagtgcgacccggctgaccaagatgtggtgcacacggccctgcgggaaacccgggaggagctgggcctggcagtgcccgaggagcacgtgtggggcctgctgcggcctgtgtatgatccgcaaaaggccaccgtggtgccagtgcttgctggtgtaggcccactggatccccagagcctcaggcccaactcggaggaggtagatgargtgtttgcactgccgctggcccacctgctgcagacgcagaatcagggctatacccacttctgccggggtggccacttccgctacacactacccgtcttcctgcatggaccacaccgggtctggggcctcacagctgtcatcactgagtttgccctgcagctgctggcacctggtacctaccagccccgcctggccggcctgacctgctcaggggctgagggtytggcccgccctaagcagcccctggcttcaccctgtcaggccagctccactccaggactgaataaaggtctttgacagctctaaaaaaaaaaa

SEQ ID NO: 52 - DNA, 486 bp, Homo sapiens
  SITE (360): n equals a,t,g, or c
  SITE (421): n equals a,t,g, or c
aaacggcgaacaacgccagcaaggtacgactgcggacatgatccataaaatcgttccgctgatcgcttatatgagcaagttttttaccctcaaggccggtgacgttgtgttgacaggcacgcctgatgggtcgggcccgttgcaaagcggtgatgagctgacagtcactttcgatgggcattctttgacaactcgcgttttgtaatactttttgccgcctgaagcggsggcaaaacttgcatcgctgtgccagactggttataaggtgcgttttaacgtaatggcggaacacctgatgagcgatgtacctttctggcaaagtaaaaccctggacgaaatgagcgatgcggaatgggatcnttgtgttgatggttgcggtcagtgtttgcctgcataaactgatggatgaaagacccgaacnaaatctacttcactaacgtccctgtcgcccactcaatattaaaacctgtccatgttcggaactac

SEQ ID NO: 53 - DNA, 2748 bp, Homo sapiens
  SITE (2727): n equals a,t,g, or c
  SITE (2742): n equals a,t,g, or c
  SITE (2743): n equals a,t,g, or c
gctcgtgccgcgcggggcgggtgctgcttgctgcaggctctggggagtcgccatgcctacaacacagcagtcccctcaggatgagcaggaaaagctcttggatgaagccatacaggctgtgaaggtccagtcattccaaatgaagagatgcctggacaaaaacaagcttatggatgctctaaaacatgcttctaatatgcttggtgaactccggacttctatgttatcaccaaagagttactatgaactttatatggccatttctgatgaactgcactacttggaggtctacctgacagatgagtttgctaaaggaaggaaagtggcagatctctacgaacttgtacagtatgctggaaacattatcccaaggctttaccttttgatcacagttggagttgtatatgtcaagtcatttcctcagtccaggaaggatattttgaaagatttggtagaaatgtgccgtggtgtgcaacatcccttgaggggtctgtttcttcgaaattaccttcttcagtgtaccagaaatatcttacctgatgaaggagagccaacagatgaagaaacaactggtgacatcagtgattccatggattttgtactgctcaactttgcagaaatgaacaagctctgggtgcgaatgcagcatcagggacatagccgagatagagaaaaaagagaacgagaaagacaagaactgagaattttagtgggaacaaatttggtgcgcctcagtcagttggaaggtgtaaatgtggaacgttacaaacagattgttttgactggcatattggagcaagttgtaaactgtagggatgctttggctcaagaatatctcatggagtgtattattcaggttttccctgatgaatttcacctccagactttgaatccttttcttcgggcctgtgctgagttacaccagaatgtaaatgtgaagaacataatcattgctttaattgatagattagctttatttgctcaccgtgaagatggacctggaatcccagcggatattaaactttttgatatattttcacagcaggtggctacagtgatacagtctagacaagacatgccttcagaggatgttgtatctttacaagtctctctgattaatcttgccatgaaatgttaccctgatcgtgtggactatgttgataaagttctagaaacaacagtggagatattcaataagctcaaccttgaacatattgctaccagtagtgcagtttcaaaggaactcaccagacttttgaaaataccagttgacacttacaacaatattttaacagtcttgaaattaaaacattttcacccactctttgagtactttgactacgagtccagaaagagcatgagttgttatgtgcttagtaatgttctggattataacacagaaattgtctctcaagaccaggtggattccataatgaatttggtatccacgttgattcaagatcagccagatcaacctgtagaagaccctgatccagaagattttgctgatgagcagagccttgtgggccgcttcattcatctgctgcgctctgaggaccctgaccagcagtacttgattttgaacacagcacgaaaacattttggagctggtggaaatcagcggattcgcttcacactgccacctttggtatttgcagcttaccagctggcttttcgatataaagagaattctaaagtggatgacaaatgggaaaagaaatgccagaagattttttcatttgcccaccagactatcagtgctttgatcaaagcagagctggcagaattgcccttaagactttttcttcaaggagcactagctgctggggaaattggttttgaaaatcatgagacagtcgcatatgaattcatgtcccaggcattttctctgtatgaagatgaaatcagcgattccaaagcacagctagctgccatcaccttgatcattggcacttttgaaaggatgaagtgcttcagtgaagagaatcatgaacctctgaggactcagtgtgcccttgctgcatccaaacttctaaagaaacctgatcagggccgagctgtgagcacctgtgcacatctcttctggtctggcagaaacacggacaaaaatggggaggagcttcacggaggcaagagggtaatggagtgcctaaaaaaagctctaaaaatagcaaatcagtgcatggacccctctctacaagtgcagctttttatagaaattctgaacagatatatctatttttatgaaaaggaaaatgatgcggtaacaattcaggttttaaaccagcttatccaaaagattcgagaagacctcccgaatcttgaatccagtgaagaaacagagcagattaacaaacattttcataacacactggagcatttgcgcttgcggcgggaatcaccagaatccgaggggccaatttatgaaggtctcatcctttaaaaaggaaatagctcaccatactcctttccatgtacatccagtgagggttttattacgctaggtttcccttccatagattgtgcctttcagaaatgctgaggtaggtttcccatttcttacctgtgatgtgttttacccagcacctccggacactcaccttcaggaccttaataaaattattcacttggtaagtgttcaagtctttctgatcaccccaagtagcatgactgatctgcaatttaaaattcctgtgatctgtaaaaaaaaaaaaaaaaaaaaagggnggccgccctaggggnnccaag

SEQ ID NO: 54 - DNA, 1066 bp, Homo sapiens
  SITE (3): n equals a,t,g, or c
  SITE (4): n equals a,t,g, or c
ggnnatgaatacgccagcgcgcaattaaccctcactaaagggaacaaaagctggagctccaccgcggtggcggccgctctagaactagtggatcccccgggctgcaggaattcggcacgagggaacatccacatcttctgtactcgtccattctgtgtccccggggcctggagtaaagacaccttcaaatgcagagactcttcagattcagctttcctggaaactgatcttcaatgcactaagagaaggagactctcaaaccaaaaatgacctggaggcaccatgtcaggcttctgtttacggtcagtttggcattacagatcatcaatttgggaaacagctatcaaagagagaaacataacggcggtagagrggaagtcaccaaggttgccactcagaagcaccgacagtcaccgctyaactggacctccagtcatttcggagaggtgactgggagcgccgagggctgggggccggaggagccgctcccctactcccgggctttcggagagggtgcgtccgcgcggccgcgctgctgcaggaacggcggtacctgcgtgctgggcagcttctgcgtgtgcccggcccacttcaccggccgctactgcgagcatgaccagaggcgcagtgaatgcggcgccctggagcacggagcctggaccctccgcgcctgccacctctgcaggtgcatcttcggggccctgcactgcctccccctccagacgcctgaccgctgtgacccgaaagacttcctggcctcccacgctcacgggccgagcgccgggggcgcgcccagcctgctactcttgctgccctgcgcactcctgcaccgcctcctgcgcccggatgcgcccgcgcaccctcggtccctggtcccttccgtcctccagcgggagcggcgcccctgcggaaggccgggacttgggcatcgcctttaattttctatgttgtaaataatagatgtgtttagtttaccgtaagctgaagcactgggtgaatatttttattgggtaataaatattttcatgaaagcgcaaaaaaaaaaaaaaaaaagttcctcgtgccg

SEQ ID NO: 55 - DNA, 2249 bp, Homo sapiens
acggaggcccggaccgtgctcaggtgctgccgagggtggacgcagcagcccgacgaggagggctgcctctcggctgaatgcagcgccggcctctgttttcacggtggccgttgtgtgccaggctcagcccagccgtgtcactgtccccccggcttccagggaccccgctgtcagtatgatgtggacgaatgccgaacccacaacggtggctgccagcaccggtgcgtgaacaccccaggctcctacctctgtgagtgcaagcccggcttccggctccacactgacagcaggacctgcctggccattaactcctgcgccctgggcaatggcggctgccagcaccactgtgtccagctcacaatcactcggcatcgctgccagtgccggcccgggttccagctccaggaggacggcaggcattgtgtccgtgagtgctgccagcctgggagggaggacctgggggtggaggcaggacaagctgcctcgcctgggctgttgggtggaagtgggtcttcaggaggcccccaaggctgctgagaggcctggtagggatggcacatttggggccaggaagctcaggatgggggccacctcacttccataggtgcccacctgaggcttgctgcccttgggaggaggaggcaggccagtccggtttggcactttgctctgagtcctcagggctgcttgcgtggaaagggggggctttgctgatggtgacggtgcggcagactcagtggtcctccagaatatggaaatgggggctgtgggtggggcaggtgctgagagaatgcccccacctgggcctctgggtcctccccagtgtgggcatgaaggggctggagtcacagagctggggggccgccgccttggtgtcagcgccagcacctgggctaagaagggtggtgggaggagctggcctgggccgctgcctgacctgggctggctggccgcgtcctgagactgcagagtcttctcggcgtcttgggggcttcccgcacctgggaggagggagacccgctgcccagcccatcagcctggagcacagagtggggagagcactgggtgaggggtctcacaagaagcctgggggcaggcgccctgcagccactggggtcccctctccccaaccccctcctcgggcccgtggctgcaggtagaagcccgtgtgccaacaggaacggcagctgcatgcacaggtgccaggtggtccggggcctcgcccgctgtgagtgccacgtgggctatcagctagcagcggacggcaaggcctgtgaaggtaggacgcccctcccctgctccgccccgcccagggtcagaaagcgcacccaggtgctgtggagggacccgtgtctaactctggggccgtggcctcccatgagaccaggccctttggccttgcccccttgggtgacctgggatgtggcggtctcatctcccttgctgggggctgaggggcgagggtaggaaggctcgcaaaagctgctcccagcccgaggctcatttcactaggagtgagccagggagcccaggtgttgcttatagtttttaaactattgtatttcctttttttttttttgagacggagtctcgctctattgcccaggctggagtgcagtggcgtgatctcagctcactgcaagctccgcctcccaggctcacgccattctcttgccttggcctccccagcagctgggactacaggcacccgccgccaggcctggctaatttttcgtatttttagtagagatggggtttcaccatgttggccaggatgctctcaatctcctgaccttgtgatccgcccgcctcggcctcccaaagtgctgggattacaggcgtgagccactgcacctggcctaaactattgtatttcctaagtagtgcctgcccagcaggaaaactgaagagatgaataagagaaaaggagaaatgagccaggcgctgtggctcacacctgtaatcccagcactttggtaggccaacgagggaggaccacttaagccaagttgctcaagaccagcctgggcagcatggcgagaccctgtctctaaacaattttttttttaattagccaggtgtggtggtgctgtctggagtcctagctgctccggaatctgaggcgggaagatcacttgagcccaggaggtcaaggctgcagtgggctgtgatcacaccactgcactccagcctgggtggcagagcaagattctgtctcttaaaaaaaaaaaaaaaaaaaaaaaaaaaaa

SEQ ID NO: 56 - DNA, 3723 bp, Homo sapiens
ggcacgagggagcatggagcgcttggcagccttggggaacatgcagcgaaagttgtgggaaaggtactcagacaagagcaagactttgtaataacccaccaccagcgtttggtgggtcctactgtgatggagcagaaacacagatgcaagtttgcaatgaaagaaattgtccaattcatggcaagtgggcgacttgggccagttggagtgcctgttctgtgtcatgtggaggaggtgccagacagagaacaaggggctgctccgaccctgtgccccagtatggaggaaggaaatgcgaagggagtgatgtccagagtgatttttgcaacagtgacccttgcccaacccatggtaactggagtccttggagtggctggggaacatgcagccggacgtgtaacggagggcagatgcggcggtaccgcacatgtgataaccctcctccctccaatgggggaagagcttgtgggggaccagactcccagatccagaggtgcaacactgacatgtgtcctgtggatggaagttggggaagctggcatagttggagccagtgctctgcctcctgtggaggaggtgaaaagactcggaagcggctgtgcgaccatcctgtgccagttaaaggtggccgtccctgtcccggagacactactcaggtgaccaggtgcaatgtacaagcatgtccaggtgggccccagcgagccagaggaagtgttattggaaatattaatgatgttgaatttggaattgctttccttaatgccacaataactgatagccctaactctgatactagaataatacgtgccaaaattaccaatgtacctcgtagtcttggttcagcaatgagaaagatagtttctattctaaatcccatttattggacaacagcaaaggaaataggagaagcagtcaatggctttaccctcaccaatgcagtcttcaaaagagaaactcaagtggaatttgcaactggagaaatcttgcagatgagtcatattgcccggggcttggattccgatggttctttgctgctagatatcgttgtgagtggctatgtcctacagcttcagtcacctgctgaagtcactgtaaaggattacacagaggactacattcaaacaggtcctgggcagctgtacgcctactcaacccggctgttcaccattgatggcatcagcatcccatacacatggaaccacaccgttttctatgatcaggcacagggaagaatgcctttcttggttgaaacacttcatgcatcctctgtggaatctgactataaccagatagaagagacactgggttttaaaattcatgcttcaatatccaaaggagatcgcagtaatcagtgcccctccgggtttaccttagactcagttggacctttttgtgctgatgaggatgaatgtgcagcagggaatccctgctcccatagctgccacaatgccatggggacttactactgctcctgccctaaaggcctcaccatagctgcagatggaagaacttgtcaagatattgatgagtgtgctttgggtaggcatacctgccacgctggtcaggactgtgacaatacgattggatcttatcgctgtgtggtccgttgtggaagtggctttcgaagaacctctgatgggctgagttgtcaagatattaatgaatgtcaagaatccagcccctgtcaccagcgctgtttcaatgccataggaagtttccattgtggatgtgaacctgggtatcagctcaaaggcagaaaatgcatggatgtgaacgagtgtagacaaaatgtatgcagaccagatcagcactgtaagaacacccgtggtggctataagtgcattgatctttgtccaaatggaatgaccaaggcagaaaatggaacctgtattgatattgatgaatgtaaagatgggacccatcagtgcagatataaccagatatgtgagaatacaagaggcagctatcgttgtgtatgcccaagaggttatcggtctcaaggagttggaagaccctgcatggatattgatgaatgtgaaaatacagatgcctgccagcatgagtgtaagaatacctttggaagttatcagtgcatctgcccacctggctatcaactcacacacaatggaaagacatgccaagatatcgatgaatgtctggagcagaatgtgcactgtggacccaatcgcatgtgcttcaacatgagaggaagctaccagtgcatcgatacaccctgtccacccaactaccaacgggatcctgtttcagggttctgcctcaagaactgtccacccaatgatttggaatgtgccttgagcccatatgccttggaatacaaactcgtctccctcccatttggaatagccaccaatcaagatttaatccggctggttgcatacacacaggatggagtgatgcatcccaggacaactttcctcatggtagatgaggaacagactgttccttttgccttgagggatgaaaacctgaaaggagtggtgtatacaacacgaccactacgagaagcagagacctaccgcatgagggtccgagcctcatcctacagtgccaatgggaccattgaatatcagaccacattcatagtttatatagctgtgtccgcctatccatactaaggaactctccaaagcctattccacatatttaaaccgcattaatcatggcaatcaagcccccttccagattactgtctcttgaacagttgcaatcttggcagcttgaaaatggtgctacactctgttttgtgtgccttccttggtacttctgaggtattttcatgatcccaccatggtcatatcttgaagtatggtctagaaaagtcccttattattttatttattacactggagcagttacttcccaaagattattctgaacatctaacaggacatatcagtgatggtttacagtagtgtagtacctaagatcattttcctgaaagccaaaccaaacaacgaaaagcaagaacaactaattcagaatcaaatagagtttttgagcatttgactatttttagaatcataaaattagttactaagtattttgatcaaagcttataaaataacttacggagatttttgtaagtattgatacattataataggacttgcctattttcatttttaagaagaaaaacaccactcattttataaaatatagtacagctactataaggcttgtttgatcccaaatggtgcttatcttgattgaacattcagaacaaggatattattttcagtgattttgtgagatcagctgaaccacttatgataataataataaaaaagactgctttgccctcacgtcagttgtacatggcatggaactttaaaaattttaatataaactttcatccagttagcttcataacttttacgttccagaattttgtttattttcctgtcaatgaaagcaatttttaaagataccagtgggacaggtttggttttttaaaaatctcatgtgttcaaattaacataaatattacacgtcaatacactgtacatggtggtaatagactctaagcaattgccaagatgtattctatttttatgaagtgtatatatattaccttagtgtgcattttctatataatatcttgatggactcttttataaaattattttataaaaaacaatgttacactaaaatcagcctaaataaattttcacaactttttttcataaaaaaaaaaaaaaaaaa

SEQ ID NO: 57 - DNA, 1929 bp, Homo sapiens
  SITE (1381): n equals a,t,g, or c
  SITE (1919): n equals a,t,g, or c
cccacgcgtccgaaagcactaaataatttgttctgatccacagctaccaagtggcccatccaacaggacttctcaggtgaaagttgtggaggtcaagcccgatatgtttcctccatataagtacagctgcactgtcacattggatttgggcctggctacatcaagaggccggggaaagtgcaagaatccctcttgtagctatgtctacaccaacaggcacaaacctcgaatttgtcccagctgtggtgttaaccttgccaaagaccggactgagaaaaccaccaaggctatcgaggtgagctcaccactcccagatgtactgaatgccacagagcccctgagcacagcccagagggagatccagcgccagtccacactgcagctgctgcgcaaagtcctgcagattcctgagaatgagtcagagctggctgaggtcttcgccttgattcatgaactcaacagctctcgacttatcttgtccaacgtgagtgaggagacagtcaccatcgagcaaacctcttggtcgaattattatgagtctccgtccacgcagtgccttctctgtagcagcccattattcaaagggggacaaaactccctggctgggccccaggagtgctggctgctgacagccagccgtctgcagacagtgactgcccaggtgaagatgtgtctgaacccccattgtctggccctgcacagcttcatagacatctacacaggtctctttaatgtggggaacaagctgctggtaagcctggacttgctttttgcaatcagaaatcagatcaagctcggagaggaccccagagtgtccatcaatgttgttctgaagtcggtgcaggagcagacagagaagactctgacctcggaskagctgagccagctgcaggagctgctgtgcaatggctattgggcctttgagtgcctcactgtccgagactacaatgacatgatctgtggcatctgtggtgtggcccccaaagtggaaatggctcagaggagtgargagaatgtgctagcactgaagagcgtggagttcacctggcctgaattcctgggctctaatgaggtaaatgtggaggacttttgggccacgatggagacagaggtgattgagcaggtggcatttcctgccagcatccctatcaccaaatttgatgcgtctgttattgcccccttcttcccaccactcatgagaggagctgtggtcgtcaacactgagaaagacaaaaacctggatgtgcagccagtacctggcagtggcagtgccttggtgaggctgctccaggagggcacctgcaagcttgatgagattggctcctacagtgaagagaagctgcagcacctgctaaggcagtgtggaatcccctttgggcangaagactccaaggaccagctctgcttctccttgttggccctctacgaatctgtacagaatggagctagagctatacggcccccacgtcacttcacaggtggtaaaatctacaaggtgtgcccccatcaggtggtctgcggctccaagtatcttgtgcgaggtgagagtgcccgtgaccatgtggacctgcttgcctcttcccgccactggccgcctgtctatgtggtagatatggccacgtcagcsctgtgtgctgacctctgctacccagagctgactaaccagatgtgggggaggaaccagggctgtttctctagccccacagagccacctgtgagtgtgtcctgcccagagctcttggaccagcattatactgtggacatgacagaaactgagcactctatccagcacccagtcaccaagactgccacgsggcgcattcgtccatgcaggcctacagcccaatctgggtgaccccagttgttggggamcattccttgggccctgttgccctgaatttggcaacttaaggcaaccntctggggttt

SEQ ID NO: 58 - DNA, 1007 bp, Homo sapiens
ggagaaggtttctctctcatctccttctccagcaaccttggccatggaccagccggctggcctgcaggtggactacgtcttccggggtgtggagcatgccgtgcgggtgatggtttctgggcaggtgctggagctggaggtggaggaccggatgacggctgaccagtggcggggcgagttcgatgctggcttcattgaagatttgactcacaagacagggaacttcaaacagttcarcaycyycystcatatgctggagtcagccctcactcagagtagtgagtcagtcaccctggacctgctgacctacacagacctggagtccctgggaaccgcaagatggggggccgcccagctccttggcccccaggtcggcccagctcaactccaagcgctacctgatcctcatctactccgtggagtttgacaggattcactacccgctgcccctcccgtaccagggcaagccagaccccgtggttctgcagggcatcatccggtcactgaaggaggaactgggccgcctgcaagggctggatggccagaacactcgggacacccgggagaatgagatctggcayctgcgggagcaggtgtcgcgcctggcgtccgagaagcgggagctggaggcgcagctgggccgatcgcgcgaggaggcgctggccgggcgcgcggcacgccaggaggccgaggcgctgcgcgggctggtgcgcgggctggagctggagctgcggcaggagcgcggcctcgggcacagggtggccggccgtcgcggccaggactgccgccgtctggccaaggagctcgaggaggcgaaggcatcggagcggagcctgcgcgcccggctgaagacgctgaccagcgagctggcattgtacaagagggggaggcggactccgccggtgcagccgcccccgacgcgggaggaccgggcctcatcgtcccgggagcgctccgcgtcgcgaggccgcggcgccgcgcgctcctcatcccgggagagcggccgc

SEQ ID NO: 59 - DNA, 530 bp, Homo sapiens
ggctcctccaagattcccttggtggcaatgccaagactgtgatggtggccaacgtggggcctgcctcttacaacgtagaagagactctgaccactctgcgatatgccaaccgtgccaaaaacattaagaacaaaccaagggtcaatgaggaccccaaggatgccctccttcgagaattccaggaagagggtgaggaggaaggggatgataaggatgattactggcgggaacagcaagaaaaactggagattgagaagcgggccattgtagaggatcacagcttggttgcagaggagaagatgaggctgctgaaggagaaagagaaaaagatggaggacctgcggcgggagaaggatgctgccgagatgctgggcgccaagatcaaggccatggagagtaagttgcttgttggaggaaaaaatatagtagatcatacgaatgaacagcagaaaatcctggagcagaaacgacaggaaattgcagagcagaaacgtcgagaaagagaaatccagcaacagatggaaagtcga

SEQ ID NO: 60 - DNA, 3804 bp, Homo sapiens
ggcacgaggtgttccagtagaatgtccccaacctgagaaaatccccaatggaatcattgatgtgcaaggccttgcctatctcagcacagctctctatacctgcaagccaggctttgaattggtgggaaatactaccaccctttgtggagaaaatggtcactggcttggaggaaaaccaacatgtaaagccattgagtgcctgaaacccaaggagattttgaatggcaaattctcttacacggacctacactatggacagaccgttacctactcttgcaaccgaggctttcggctcgaaggtcccagtgccttgacctgtttagagacaggtgattgggatgtagatgccccatcttgcaatgccatccactgtgattccccacaacccattgaaaatggttttgtagaaggtgcagattacagctatggtgccataatcatctacagttgcttccctgggtttcaggtggctggtcatgccatgcagacctgtgaagagtcaggatggtcaagttccatcccaacatgtatgccaatagactgtggcctccctcctcatatagattttggagactgtactaaactcaaagatgaccagggatattttgagcaagaagacgacatgatggaagttccatatgtgactcctcaccctccttatcatttgggagcagtggctaaaacctgggaaaatacaaaggagtctcctgctacacattcatcaaactttctgtatggtaccatggtttcatacacctgtaatccaggatatgaacttctggggaaccctgtgctgatctgccaggaagatggaacttggaatggcagtgcaccatcctgcatttcaattgaatgtgacttgcctactgctcctgaaaatggctttttgcgttttacagagactagcatgggaagtgctgtgcagtatagctgtaaacctggacacattctagcaggctctgacttaaggctttgtctagagaatagaaagtggagtggtgcctccccacgctgtgaagccatttcatgcaaaaagccaaatccagtcatgaatggatccatcaaaggaagcaactacacatacctgagcacgttgtactatgagtgtgaccccggatatgtgctgaatggcactgagaggagaacatgccaggatgacaaaaactgggatgaggatgagcccatttgcattcctgtggactgcagttcacccccagtctcagccaatggccaggtgagaggagacgagtacacattccaaaaagagattgaatacacttgcaatgaagggttcttgcttgagggagccaggagtcgggtttgtcttgccaatggaagttggagtggagccactcccgactgtgtgcctgtcagatgtgccaccccgccacaactggccaatggggtgacggaaggcctggactatggcttcatgaaggaagtaacattccactgtcacgagggctacatcttgcacggtgctccaaaactcacctgtcagtcagatggcaactgggatgcagagattcctctctgtaaaccagtcaactgtggacctcctgaagatcttgcccatggtttccctaatggtttttcctttattcatgggggccatatacagtatcagtgctttcctggttataagctccatggaaattcatcaagaaggtgcctctccaatggctcctggagtggcagctcaccttcctgcctgccttgcagatgttccacaccagtaattgaatatggaactgtcaatgggacagattttgactgtggaaaggcagcccggattcagtgcttcaaaggcttcaagctcctaggactttctgaaatcacctgtgaagccgatggccagtggagctctgggttcccccactgtgaacacacttcttgtggttctcttccaatgataccaaatgcgttcatcagtgagaccagctcttggaaggaaaatgtgataacttacagctgcaggtctggatatgtcatacaaggcagttcagatctgatttgtacagagaaaggggtatggagccagccttatccagtctgtgagcccttgtcctgtgggtccccaccgtctgtcgccaatgcagtggcaactggagaggcacacacctatgaaagtgaagtgaaactcagatgtctggaaggttatacgatggatacagatacagatacattcacctgtcagaaagatggtcgctggttccctgagagaatctcctgcagtcctaaaaaatgtcctctcccggaaaacataacacatatacttgtacatggggacgatttcagtgtgaataggcaagtttctgtgtcatgtgcagaagggtatacctttgagggagttaacatatcagtatgtcagcttgatggaacctgggagccaccattctccgatgaatcttgcagtccagtttcttgtgggaaacctgaaagtccagaacatggatttgtggttggcagtaaatacacctttgaaagcacaattatttatcagtgtgagcctggctatgaactagaggggaacagggaacgtgtctgccaggagaacagacagtggagtggaggggtggcaatatgcaaagagaccaggtgtgaaactccacttgaatttctcaatgggaaagctgacattgaaaacaggacgactggacccaacgtggtatattcctgcaacagaggctacagtcttgaagggccatctgaggcacactgcacagaaaatggaacctggagccacccagtccctctctgcaaaccaaatccatgccctgttccttttgtgattcccgagaatgctctgctgtctgaaaaggagttttatgttgatcagaatgtgtccatcaaatgtagggaaggttttctgctgcagggccacggcatcattacctgcaaccccgacgagacgtggacacagacaagcgccaaatgtgaaaaaatctcatgtggtccaccagctcacgtagaaaatgcaattgctcgaggcgtacattatcaatatggagacatgatcacctactcatgttacagtggatacatgttggagggtttcctgaggagtgtttgtttagaaaatggaacatggacatcacctcctatttgcagagctgtctgtcgatttccatgtcagaatgggggcatctgccaacgcccaaatgcttgttcctgtccagagggctggatggggcgcctctgtgaagaaccaatctgcattcttccctgtctgaacggaggtcgctgtgtggccccttaccagtgtgactgcccgcctggctggacggggtctcgctgtcatacagctgtttgccagtctccctgcttaaatggtggaaaatgtgtaagaccaaaccgatgtcactgtctttcttcttggacgggacataactgttccaggaaaaggaggactgggttttaaccactgcacgaccatctggctctcccaaaagcaggatcatctctcctcggtagtgcctgggcatcctggaacttatgcaaagaaagtccaacatggtgctgggtcttgtttagtaaacttgttacttggggttactttttttattttgtgatatattttgttattccttgtgacatactttcttacatgtttccatttttaaatatgcctgtattttctatataaaaattatattaaatagatgctgctctaccctcacaaaatgtacatattctgctggctattgggaaagttcctggtacacatttttattcagttacttaaaatgatttttccattaaagtatattttgctactaaataaaaaaaaaaaaaaaaaaaaaa

SEQ ID NO: 61 - DNA, 540 bp, Homo sapiens
gctcgtgccgcggccgctgtcagtgccgcgagcgtacgttcggcgcgcgctgcgatcgctactgccagtgcttccgcggccgctgccaccctgtggacggcacgtgtgcctgcgagccgggctaccgcggcaagtactgtcgcgagccgtgccccgccggcttctacggcttgggctgtcgccgccggtgtggccagtgcaagggccagcagccgtgcacggtggccgagggccgctgcttgacgtgcgagcccggctggaacggaaccaagtgcgaccagccttgcgccaccggtttctatggcgagggctgcagccaccgctgtccgccatgccgcgacgggcatgcctgtaaccatgtcaccggcaagtgtacgcgctgcaacgcgggctggatcggcgaccggtgcgagaccaagtgtagcaatggcacttacggcgaggactgcgccttcgtgtgcgccgactgcggcagcggacactgcgacttccagtcggggcgctgcctgtgcagccctggcgtccacgggccccactgta

SEQ ID NO: 62 - DNA, 1736 bp, Homo sapiens
ggcacgagccacgggggcagccgggcgcgacggtcggctgcgtgtgggtttgcggctgttggaggtgaaccagcagagcctgctgggcctgacgcacggcgaggcggtgcagctgctccgcagtgtgggcgacaccctcaccgtgctggtctgtgacggcttcgaggccagcaccgacgcagccctggaggtgtccccaggtgtcattgccaacccctttgcggcaggcatcggccaccggaacagcctggagagcatctcttccatcgaccgggagctgagccctgagggcccaggcaaggagaaggagctgcctggacagaccctgcactgggggcccgaggccacagaagccgcaggtcggggtctgcagcccctgaagctggactaccgcgccctggccgccgtgcccagcgctggcagcgtgcagagggtaccgtctggagcagctggagggaagatggctgaatctccctgctcccctagtggccagcagccgccctccccgccttctccggatgagctgcccgccaatgtgaagcaggcctacagggccttcgcggccgtgcccacttctcacccgcctgaggatgcccctgcccagccccccacgcctgggcctgcagcctccccggagcagctgtccttccgggagcggcagaagtactttgagctggaggtgcgcgtgccccaggccgagggcccccctaagcgcgtgtccctggtgggtgctgacgacctgcggaagatgcaggaggaggaagccagaaaactacagcagaagagagcgcagatgctgcgggaggcggcagaggctggggccgaagcgaggctcgccctggacggggagacgctgggcgaggaggaacaggaggatgagcagccaccctgggccagcccgagccccacctcaaggcagagcccggcgtcccccccgcccctgggaggtggcgccccggtgcggacggccaaagctgaacggcgccaccaggagcggctgcgcgtgcagagtccggagccaccggcacccgagcgtgccctgtcccctgccgagctccgggccctggaggccgagaagcgtgcgctgtggagggcagccaggatgaagtcattggaacaggacgctctccgagcacagatggtcctcagcaggtcccaggaaggccggggcacgcgggggcccctggagcgactggccgaggccccttcccctgcgcccaccccgtcgcccacccctgtggaagaccttggcccccagaccagcacctccccgggacgcctgtcaccggactttgctgaggagttgaggtccctggaaccatctcccagccctggcccgcaggaggaggatggagaagtggctctggtgcttctgggcaggccctcacccggcgctgtgggccctgaagatgtggcactgtgcagcagccgccgccccgtaaggcctgggcgccgtggcctgggccctgtgccctcctagaggagcaggcacctcccccagacttggggtgggggccctgccagctccagcaccacccttgccccaagtcttttaacctgggtgttagcattttaaagagaccccacaggagttctggcctgtgactaactaactgccccaccccagccgagacctcggcgagactgtaactagtgatgtttgtacaaccaaagactctattttgtggtttaaggagaataaagttgactacattttaaaaaaaaaaaaaaaaaaa

SEQ ID NO: 63 - DNA, 1439 bp, Homo sapiens
  SITE (10): n equals a,t,g, or c
  SITE (14): n equals a,t,g, or c
  SITE (19): n equals a,t,g, or c
  SITE (38): n equals a,t,g, or c
  SITE (51): n equals a,t,g, or c
acgggatttntggnatgcnattcccgacactatagatngtacgcctgcagntaccggtccggaattcccgggtcgacccacgcgtccgcccgccccaccagccatggtggtttctggagcgcccccagccctgggtgggggctgtctcggcaccttcacctccctgctgctgctggcgtcgacagccatcctcaatgcggccaggatacctgttcccccagcctgtgggaagccccagcagctgaaccgggttgtgggcggcgaggacagcactgacagcgagtggccctggatcgtgagcatccagaagaatgggacccaccactgcgcaggttctctgctcaccagccgctgggtgatcactgctgcccactgtttcaaggacaacctgaacaaaccatacctgttctctgtgctgctgggggcctggcagctggggaaccctggctctcggtcccagaaggtgggtgttgcctgggtggagccccaccctgtgtattcctggaaggaaggtgcctgtgcagacattgccctggtgcgtctcgagcgctccatacagttctcagagcgggtcctgcccatctgcctacctgatgcctctatccacctccctccaaacacccactgctggatctcaggctgggggagcatccaagatggagttcccttgccccaccctcagaccctgcagaagctgaaggttcctatcatcgactcggaagtctgcagccatctgtactggcggggagcaggacagggacccatcactgaggacatgctgtgtgccggctacttggagggggagcgggatgcttgtctgggcgactccgggggccccctcatgtgccaggtggacggcgcctggctgctggccggcatcatcagctggggcgagggctgtgccgagcgcaacaggcccggggtctacatcagcctctctgcgcaccgctcctgggtggagaagatcgtgcaaggggtgcagctccgcgggcgcgctcaggggggtggggccctcagggcaccgagccagggctctggggccgccgcgcgctcctagggcgcagcgggatgcggggctcggatctgaaaggcggccagatccagatctggatctggatctgcggcggcctcgggcggtttcccccgccgtaaataggctcatctacctctgggggcccggacggctgctgcggaaaggaaaccccctccccgacccgcccgacggcctcaggccccgcctccaaggcatcaggccccgcccaacggcctcatgtccccgcccccacgacttccggccccgcccccgggccccagcgcttttgtgtatataaatgttaatgatttttataggtatttgtaaccctgcccacatatcttatttattcctccaatttcaataaattatttattctccaaaaaaaaaaaaaaagggcggccgc

SEQ ID NO: 64 - DNA, 2731 bp, Homo sapiens
  SITE (1256): n equals a,t,g, or c
gcggaggcagggcgggcgtattcaatggaagtgtgttaccagctgccggtactgcccctggacaggccggtcccccagcacgtcctcagccgccgaggagccatcagcttcagctccagctccgctctcttcggctgccccaatccccggcagctctctcagaggcgtggagctatttcctatgacagttctgatcagactgcattatacattcgtatgctaggagatgtacgtgtaaggagccgagcaggatttgaatcagaaagaagaggttctcacccatatattgattttcgtattttccactctcaatctgaaattgaagtgtctgtctctgcaaggaatatcagaaggctactaagtttccagcgatatcttagatcttcacgcttttttcgtggtactgcggtttcaaattccctaaacattttagatgatgattataatggacaagccaagtgtatgctggaaaaagttggaaattggaattttgatatctttctatttgatagactaacaaatggaaatagtctagtaagcttaacctttcatttatttagtcttcatggattaattgagtacttccatttagatatgatgaaacttcgtagatttttagttatgattcaagaagattaccacagtcaaaatccttaccataacgcagtccacgctgcggatgttactcaggccatgcactgttacttaaaggaacctaagcttgccaattctgtaactccttgggatatcttgctgagcttaattgcagctgccactcatgatctggatcatccaggtgttaatcaacctttccttattaaaactaaccattacttggcaactttatacaagaatacctcagtactggaaaatcaccactggagatctgcagtgggcttattgagagaatcaggcttattctcacatctgccattagaaagcaggcaacaaatggagacacagataggtgctctgatactagccacagacatcagtcgccagaatgagtatctgtctttgtttaggtcccatttggatagaggtgatttatgcctagaagacaccagacacagacatttggttttacagatggctttgaaatgtgctgatatttgtaacccatgtcggacgtgggaattaagcaagcagtggagtgaaaaagtaacggaggaattcttccatcaaggagatatagaaaaaaaatatcatttgggtgtgagtccactttgcgatcgtcacactgaatctattgccancatccagattggtaactatacatatttagatatagctggttagaaaaatgccactgtttttatcaagaagggaaatatatttgaaatataaaatattaaaattatgctcatttctatttttaaaaataatttaagaaattttacccttgttttcccttgttatggctcttctaattctcatttaattttaggatgtaaaaagtatatttttgcagaacaggcagcagcaataacttgtttctgttcttatgtaaataagaatccattattcgctcatgtggaagcttcttttgcatcatttgggactgccatttaaaaaaggataggtaaacaargaaatgacaaaaataaaataaataaaataaaaatggataggtggtgacccactgagcctgatcataatacgaagaccagcttctgccactgcctttccagactcttaccactgcctgttgattaaatctaactcttcaacatcctagacaggcccttataatctagcttcaaatgctgtgcagccatcttgcctcaacttccctctcatttgcctacagcatctcgggacgcttctgtgtttcccaagtatacgctgttctttcgctctttgtgcctcgccagtgctttccatgtgcctcgtagagttatttttcttgaagaggcagctcaaatgtcaccttctccagaagctgctctccacttgctttaggcagagtcagtcacttttcttctagattccaaagtgcctgatccacttggttgtggattcctggagcctagcaccacaccagaagcacgaggcccttgagaactgtgtgttgagtgaactaataactgtattatagaaagcataatgaaaatgtcctgtgactgaagtatgtgtagcttgttgcaggagttcacaggaaagttgactaggattgagtgtgttgggctttgggtataaaggagggggattctacgggggcagtagctcaacaaggaatagagggaggagtgtaattttggtagctggtgttgaatagggcctttgagaatcagactgaacacagtgaaatatgtgcccaaagttcagaaagatgaagtttccagaaactaagaaggtagcacaatatgtggcatcatactcagaaaggaagaccatgccatggggccagaaattcagaaacgtaattcttacattgtgattgcaatggatactcatggaagaaagtgggtagtggccgatttgacttcagagtgacaggtagagaagggaagagcgtgtagaactgtggccagactttaggagtgtgagggatgctgaatctcccagagagctcacactggccaggaatgctgagagtagcagatgcttttcttttgggaggatagtaaaacaatttagaaccagatatgctttgtcttgattctcaagtagaataatcttcaaatgcaaaagaatacattagaaaggacaaaagtggccaggagcggta

SEQ ID NO: 65 - DNA, 595 bp, Homo sapiens
gcacgagcagctggcagcctcctgggtgatggagctgtctgtagttacaggcccatagttgactacatcgatgcgcagtttgaaaattatctgcaggaggagctgaagatccgccgctcgctcttcgactaccatgacacaaggatccacgtttgcctctacttcatcacgcccacagggcactccctgaagtctctagatctagtgaccatgaagaaactagacagcaaggtgaacattattcccatcatcgccaaggctgacaccatctccaagagcgagcagacccacagccggcactacgagctctaccggcgctgcaagttggaggagatgggctttcaggacagcgatggtgacagccagcccttcagcctacaagagacatcctcagcagctcattcggggaatagtcagagccatagtgctttgtgaagtcttttacttgtggaataaactgtaaaaagaaaataaagaggccaaagccctaaaaaaaaaaaaaaaaaaaaaaaaaaaaaaaaaaaaaaaaaaaaaaaaaaaaaaaaaaaaaaaaaaaaaaaaaaaaaaaaaaaaaaaaaaaaaaaaaaaaaaaaaa

SEQ ID NO: 66 - DNA, 1620 bp, Homo sapiens
ggcacgagggatacctggccgcgggatgctgggcggcgtcaggtaaccatggagaaagagctgcggagcaccattcttttcaatgcctacaaaaaggagatatttaccaccaacaatggctacaaatccatgcagaaaaaacttcggagtaattggaagattcagagcttaaaagatgaaatcacatctgagaagttaaatggagtaaaactgtggattacagctgggccaagggaaaaatttactgcagctgagttttgaaatcctgaagaaatcttgaactggtggagatgtctttgtgatgctaggagaaggtggagaatccagatttgacaccaatattaactttttactagaagaatatggaatcatggttaataatgatgctgtggttagaaatgtatatcacaaatatttccatcctaaagaagctctagtttccagtggagtcttgaacagggaaattagccgagctgcaggaaaggctgtgcctgggatcattgatgaggaaagcagtggaaacaatgcccaggctctcacctttgtgtatccttttggtgccacattgagtgtcatgaaaccagcagtggcggttctgtctacaggttctgtctgcttcccacttaacagacccattttggctttctatcactcaaagaaccaaggtgggaagctggcagtgcttggttcatgtcacatgttcagtgatcaatatttggacaaagaagaaaacagcaaaatcatggatgttgttttccagtggctcacgacaggagacatccacctaaaccagattgatgctgaggacccagagatttctgactacatgatgctgccctacacagccaccctatcaaagcggaatcgagagtgtctccaggagagtgatgagatcccaagggactttaccaccctcttcgacctgtccatcttccagctggataccacctccttccacagcgtcatcgaggctcacgagcagctaaatgtgaaacatgaaccactccagctcatccagcctcagtttgagacgccgctgccaacccttcagcctgcggtttttcctcccagtttccgggagttaccacctcctcctctggagctatttgatttagatgaaacgttctcctctgagaaggcacggctggctcagattaccaataagtgtactgaagaagacctggaattttatgtcaggaagtgtggtgatattcttggagtaaccagtaaactaccaaaggaccaacaggatgccaaacatatccttgagcacgtcttcttccaagtggtggagttcaagaaattgaaccaggaacatgacatcgatacaagtgaaacagcattccagaacaatttctgaagaccatgcctcttgaagctttttctgcctcctgattctctctttgtaaactattttcaaattgtttttcaactccttatcaaaattgtttatacactctttcctccatgagctctggaaggtatatgcatcttctgtaatactcagataggtataagatttttcacaaaatccttatgtaagatacattccatttttaaaaattaaatgtatggttgcatctgtctttttaaaaaaaaaaaaaaaaaaaaaaaaaaaaa

SEQ ID NO: 67 - DNA, 2757 bp, Homo sapiens
  SITE (2353): n equals a,t,g, or c
gaattcggcacgagataagaccatggcacttaagaacattaactaccttctcatcttctacctcagtttctcactgcttatctacataaaaaattccttttgcaataaaaacaacaccaggtgcctctcaaattcttgccaaaacaattctacatgcaaagatttttcaaaagacaatgattgttcttgttcagacacagccaataatttggacaaagactgtgacaacatgaaagacccttgcttctccaatccctgtcaaggaagtgccacttgtgtgaacaccccaggagaaaggagctttctgtgcaaatgtcctcctgggtacagtgggacaatctgtgaaactaccattggttcctgtggcaagaactcctgccaacatggaggtatttgccatcaggaccctatttatcctgtctgcatctgccctgctggatatgctggaagattctgtgagatagatcacgatgagtgtgcttccagcccttgccaaaatggggcccgtgtgccaggatggaaattgatggttactcctgcttctgtgtcccaggatatcaaggcagacactgcgacttggaagtggatgaatgtgcttcagatccctgcaagaacgaggctacatgcctcaatgaaataggaagatatacttgtatctgtccccacaattattctggtgtaaactgtgaattggaaattgacgaatgttggtcccagccttgtttaaatggtgcaacttgtcaggatgctctgggggcctatttctgcgactgtgcccctggattcctgggggatcactgtgaactcaacactgatgagtgtgccagtcaaccttgtctccatggagggctgtgtgtggatggagaaaacagatatagctgtaactgcacgggtagtggattcacagggacacactgtgagaccttgatgcctctttgttggtcaaaaccttgtcacaataatgctacatgtgaggacagtgttgacaattacacttgtcactgctggcctggatacacaggtgcccagtgtgagatcgacctcaatgaatgcaatagtaacccctgccagtccaatggggaatgtgtggagctgtcctcagagaaacaatatggacgcatcactggactgccttcttctttcagctaccatgaagcctcaggttatgtctgtatctgtcagcctggattcacaggaatccactgcgaagaagacgtcaatgaatgttcttcaaacccttgccaaaatggcggtacttgtgagaacttgcctgggaattatacttgccattgcccatttgataacctttctagaactttttatggaggaagggactgttctgatattctcctgggctgtacccatcagcaatgtctaaataatggaacatgcatccctcacttccaagatggccagcatggattcagctgcctgtgtccatctggctacaccgggtccctgtgtgaaatcgcaaccacactttcatttgagggcgatggcttcctgtgggtcaaaagtggctcagtgacaaccaagggctcagtttgtaacatagccctcaggtttcagactgttcagccaatggctcttctacttttccgaagcaacagggatgtgtttgtgaagctggagctgctaagtggctacattcacttatcaattcaggtcaataatcagtcaaaggtgcttctgttcatttcccacaacaccagcgatggagagtggcatttcgtggaggtaatatttgcagaggctgtgacccttaccttaatcgacgactcctgtaaggagaaatgcatcgcgaaagctcctactccacttgaaagtgatcaatcaatatgtgcttttcagaactcctttttgggtggtttaccagtgggaatgaccagcaatggggttgctctgcttaacttctataatatgccatccacaccttcgtttgtaggctgtctccaagacattaaaattgattggaatcacattaccctggagaacatctcgtctggctcatcattaaatgtcaaggcaggctgtgtgagaaaggattggtgtgaaagccaaccttgtcaaagcagaggacgctgcatcaacttgtggctgagttaccagtgtgactgccacaggccctatgaaggccccaactgtctgagaggtgagagaaagctgagtgctatggctaggagtgccatgcctcagagcagagcagaaacagcaaaaacagccagactgcttctgcctgctatgaaacataatgaccccacaagacttctgctgctggttgcccactgatgagaaagaaaagaagagggcagtgatgtgcgttaattaattttgagtggattcataggacatncagttcactcatacagagaagtaaaaaaaataagcagatagctcttttccaaagaggttttcatctttgtgtttgcaaaatgctactgcaattttaccattggtcacatatcagaaatttattgtaaatcttatttgaaagagaaataatcttttgaaaaaaaaaaccttagacataaaatttgtcagtgccacatactagcatgatatcttgtgcatagtaaattctcggtaaatattcatttccttgctctcctttccatgcaattcacacttgctccacaatcataattaagcatagcgtttttataaaacgccaattttattcaaaggtatcttttccaaggttgccctggagaagacagataatatactaggtgtcttaagaaaaaaaaaaaaaaaaaa

SEQ ID NO: 68 - DNA, 1375 bp, Homo sapiens
ccacgcgtccggggactcctctgtgctctgctctctctgctggcagggcatggctgggcagacacccgtgccatcggggccgaggaatgtcgccccaactcccagccttggcaggccggcctcttccaccttactcggctcttctgtggggcgaccctcatcagtgaccgctggctgctcacagctgcccactgccgcaagccgtatctgtgggtccgccttggagagcaccacctctggaaatgggagggtccggagcagctgttccgggttacggacttcttcccccaccctggcttcaacaaggacctcagcgccaatgaccacaatgatgacatcatgctgatccgcctgcccaggcaggcacgtctgagtcctgctgtgcagcccctcaacctcagccagacctgtgtctccccaggcatgcagtgtctcatctcaggctggggggccgtgtccagccccaaggcgctgtttccagtcacactgcagtgtgccaacatcagcatcctggagaacaaactctgtcactgggcataccctggccacatctcggacagcatgctctgtgcgggcctgtgggaggggggccgaggttcctgccagggtgactctgggggccccctggtttgcaatggaaccttggcaggcgtggtgtctgggggtgctgagccctgctccagaccccggcgccccgcagtctacaccagcgtatgccactaccttgactggatccaagaaatcatggagaactgagcccgcgcgccacgggggcaccttggaagaccaagagaggccgaagggcacggggtagggggttctcgtagggtcccagcctcaatggttcccgccctggacctccagctgccctgactcccctctggacactaagactccgcccctgaggctccgccccctcacgaggtcaagcaagacacagtcgcgccccctcggaacggagcagggacacgcccctcagagcccgtctctatgacgtcaccgacagccatcacctccttcttggaacagcacagcctgtggctccgccccaaggaaccacttacacaaaatagctccgcccctcggaactttgcccagtgggacttcccctcgggactccaccccttgtggccccgcctccttcaccagagatctcgcccctcgtgatgtcaggggcgcagtagctccgcccacgtggagctcgggcggtgtagagctcagccccttgtggccccgtcctgggcgtgtgctgggtttgaatcctgacggagacctggggggaaattgagggagggtctggatacctttagagccaatgcaacggatgatttttcagtaaacgcgggaaacctcaccttcaaaaaaaaaaaaaaaa

SEQ ID NO: 69 - DNA, 924 bp, Homo sapiens
ccacgcgtccgggcagtaagagagaagaaaatccaaagcatcttaaatcagaagataaggaatttaagagccttgccaataaatgcctcatcagttcaagttaatgcaatgagctcatcaacaggggagttaactgtccaagcaagttgtggtaaacgagttgttccattaaacgtcaacagaatagcatctggagtcattgcacccaaggcggcctggccttggcaagcttcccttcagtatgataacatccatcagtgtggggccaccttgattagtaacacatggcttgtcactgcagcacactgcttccagaagtataaaaatccacatcaatggactgttagttttggaacaaaaatcaaccctcccttaatgaaaagaaatgtcagaagatttattatccatgagaagtaccgctctgcagcaagagagtacgacattgctgttgtgcaggtctcttccagagtcaccttttcggatgacatacgccggatttgtttgccagaagcctctgcatccttccaaccaaatttgactgtccacatcacaggatttggagcactttactatggtggggaatcccaaaatgatctccaagaagccagagtgaaaatcataagtgacgatgtctgcaagcaaccacaggtgtatggcaatgatataaaacctggaatgttctgtgccggatatatggaaggaatttatgatgcctgcaggggtgattctgggggacctttagtcacaagggatctgaaagatacgtggtatctcattggaattgtaagctggggagataactgtggtcaaaaggacaagcctggagtctacacacaagtgacttattaccgaaactggattgcttcaaaaacaggcatctaattcacaataaaagttaaacaaagaaaaaaaaaaaaaaaaaaa

SEQ ID NO: 70 - DNA, 754 bp, Homo sapiens
ggcacgagtctcggcacagcgcgtgctgcccttcgacgacaacatctgcctgcgggagccctgcgagaactacatgcgctgcgtgtcggtgctgcgcttcgactcctccgcgcccttcatcgcctcctcctccgtgctcttccggcccatccaccccgtcggagggctgcgctgccgctgcccgcccggcttcacgggtgactactgcgagaccgaggtggacctctgctactcgcggccctgtggcccccacgggcgctgccgcagccgcgagggcggctacacctgcctctgtcgtgatggctacacgggtgagccaagggaggggactcaagggccagccctggaaggctgactgtgtggtgcaggcacaaatcaggacaaatgctggcggctgcctcattctcttcccgagtgaggtgcagctacactgagaggtcataaatccggcctgctccctgacagcaccccactgaggaaggcagtgcaaggagtgcttctccctgctgtgcacaggacacacaggcagtgccattgtgggcagagctggctccagagccagtcggcctgtgttcgtgtatcagctttgccgctagtagctgtgtgaccttgaacaagttacttaacctttctggccctcggttatttgaaatggagataatgaccgtacttaggtcataagttggttgtgaggattaatgtaattaatttgatacttggaaacaaaaaaaaaaaaaaaaaaaaaaaaaaaaaa

SEQ ID NO: 71 - DNA, 690 bp, Homo sapiens
gcgccagggccggggccgggacgggacggaaaactggcggcttggtttgttcagcgcgtcgcggtcatggctctcgtttcaggcctccacggtgtgcacctggagtcaggagcgcgcttgtgcgtacagttcggttcagttactaaaagatgtaactgaactgcagatccttggtgaaatatctttcaacaaatctctatatgagggactgaatgcagagaaccacagaactaagatcactgtcgtcttcctgaaagatgagaagtaccattctttgcctatcatcattaaaggcagcgttggtggacttctggtgttgatcgtgattctggtcatcctgttcaagtgtggcttttttaaaagaaaatatcaacaactgaacttggagagcatcaggaaggcccagctgaaatcagagaatctgctcgaagaagagaattaggacctgctatccactgggagaggctatcagccagtcctgggacttggagacccagcatcctttgcattactttttccttcaggatgatctagagcagcatggagctgttggtagaatattagtttttaaccatacattgtcccaaaagtgtctgtgcattgtgcaaaaagtaaacttaggaaacatttggtattaaataaatttacacttttctttgcaaaaaaaaaaaaaaaaaaaaaaaaaaaaaa

SEQ ID NO: 72 - DNA, 1795 bp, Homo sapiens
cacagagagaggcagcagcttgctcagcggacaaggatgctgggcgtgagggaccaaggcctgccctgcactcgggcctcctccagccagtgctgaccagggacttctgacctgctggccagccaggacctgtgtggggaggccctcctgctgccttggggtgacaatctcagctccaggctacagggagaccgggaggatcacagagccagcatggatcctgacagtgatcaacctytgaacagcctcgatgtcaaacccctgcgcaaaccccgtatccccatcatcatagcactactgagcctggcgagtatcatcattgtggttgtcctcatcaaggtgattctggataaatactacttcctctgcgggcagcctctccacttcatcccgaggaagcagctgtgtgacggagagctggactgtcccttgggggaggacgaggagcactgtgtcaagagcttccccgaagggcctgyagtggcagtccgsctctccaaggaccgatccacactgcaggtgctggactcggccacagggaactggttctctgcctgtttcgacaacttcacagaagctctcgctgagacagcctgtaggcagatgggctacagcagcaaacccactttcagagctgtggagattggcccagaccaggatctggatgttgttgaaatcacagaaaacagccaggagcttcgcatgcggaactcaagtgggccctgtctctcaggctccctggtctccctgcactgtcttgcctgtgggaagagcctgaagaccccccgtgtggtgkktggggaggaggcctctgtggattcttggccttggcaggtcagcatccagtacgacaaacagcacgtctgtggagggagcatcctggacccccactgggtcctcacggcagcccactgcttcaggaaacataccgatgtgttcaactggaaggtgcgggcaggctcagacaaactgggcagcttcccatccctggctgtggccaaratcatcatcattgaattcaaccccatgtaccccaaagacaatgacatcgccctcatgaagctgcagttcccactcactttctcaggcacagtcaggcccatctgtctgcccttctttgatgaggagctcactccagccaccccactctggatcattggatggggctttacgaagcagaatggagggaagatgtctgacatactgctgcaggcgtcagtccaggtcattgacagcacacggtgcaatgcagacgatgcgtaccagggggaagtcaccgagaagatgatgtgtgcaggcatcccggaagggggtgtggacacctgccagggtgacagtggtgggcccctgatgtaccaatctgaccagtggcatgtggtgggcatcgttagctggggctatggctgcgggggcccgagcaccccaggagtatacaccaaggtctcagcctatctcaactggatctacaatgtctggaaggatagaactattcagagaagctgtaactccccagggacaggtcttgtgattcagcaaccagctgtaccgctgatggagctacggtcagctcggcacacacatcgcctgaccacctgtgtttgctttctctcattccctgccttacagcccctgtcccccttatgcccatttccctgggattgaacccccaaataaagtgttaagatatgaatttaatgtagaaaacttaagttttctgagaaacctgggctaagactatcaaacagatgtagctctttgattataatgttattaagttctaaggcaatagcaaaaa

SEQ ID NO: 73 - DNA, 1369 bp, Homo sapiens
ggcacgaggggaaatgcaagaagaattatcagggccgaccttggagtccaggctcctatctccccatccccaaaggcactgcaaatacctgtatccccagtatttccagtattggtacgaatgtctgcgacaacgagctcctgcactgccagaacggagggacgtgccacaacaacgtgcgctgcctgtgcccggccgcatacacgggcatcctctgcgagaagctgcggtgcgaggaggctggcagctgcggctccgactctggccagggcgcgcccccgcacggctccccagcgctgctgctgctgaccacgctgctgggaaccgcagccccctggtgttctaggtgtcacctccagccacaccggacgggcctgtgccgtggggaagcagacacaacccaaacatttgctactaacataggaaacacacacatacagacacccccactcagacagtgtacaaactaagaaggcctaactgaactaagccatatttatcacccgtggacagcacatccgagtcaagactgttaatttctgactccagaggagttggcagctgttgatattatcactgcaaatcacattgccagctgcagagcatattgtggattggaaaggctgcgacagccccccaaacaggaaagacaaaaaacaaacaaatcaaccgacctaaaaacattggctactctagcgtggtgcgccctagtacgactccgcccagtgtgtggaccaaccaaatagcattctttgctgtcaggtgcattgtgggcataaggaaatctgttacaagctgccatattggcctgcttccgtccctgaatcccttccaacctgtgctttagtgaacgttgctctgtaacccttgttggttgaaagatttctttgtctgatgttagtgatgcacatgtgtaacagccccctctaaaagcgcaagccagtcatacccctgtatatcttagcagcactgagtccagtgcgagcacacacccactatacaagagtggctataggaaaaaagaaagtgtatctatccttttgtattcaaatgaagttatttttcttgaactactgtaatatgtagattttttgtattattgccaatttgtgttaccagacaatctgttaatgtatctaattcgaatcagcaaagactgacattttattttgtcctctttcgttctgttttgtttcactgtgcagagatttctctgtaagggcaacgaacgtgctggcatcaaagaatatcagtttacatatataacaagtgtaataagattccaccaaaggacattctaaatgttttcttgttgctttaacactggaagatttaaagaataaaaactcctgcataaacgaaaaaaaaa

SEQ ID NO: 74 - DNA, 1309 bp, Homo sapiens
ccacgcgtccggccaggcaggtgggcctcaggaggtgcctccaggcggccagtgggcctgaggccccagcaagggctagggtccatctccagtcccaggacacagcagcggccaccatggccacgcctgggctccagcagcatcagcagcccccaggaccggggaggcacaggtggcccccaccacccggaggagcagctcctgcccctgtccgggggatgactgattctcctccgccagccgtagggtgtgtgctgtccgggctcacggggaccctgtctccgagtcgttcgtgcagcgtgtgtaccagcccttcctcaccacctgcgacgggcaccgggcctgcagcacctaccgcaatatgccagccgccatgccggaacggagggagctgtgtccagcctggccgctgccgctgccctgcaggatggcggggtgacacttgccagtcagatgtggatgaatgcagtgctaggaggggcggctgtccccagcgctgcgtcaacaccgccggcagttactggtgccagtgttgggaggggcacagcctgtctgcagacggtacactctgtgtgcccaagggagggccccccagggtggcccccaacccgacaggagtggacagtgcaatgaaggaagaagtgcagaggctgcagtccagggtggacctgctggaggagaagctgcagctggtgctggccccactgcacagcctggcctcgcaggcactggagcatgggctcccggaccccggcagcctcctggtgcactccttccagcagctcggccgcatcgactccctgagcgagcagatttccttcctggaggagcagctggggtcctgctcctgcaagaaagactcgtgactgcccagcgccccaggctggactgagcccctcacgccgccctgcagcccccatgcccctgcccaacatgctgggggtccagaagccacctcggggtgactgagcggaaggccaggcagggccttcctcctcttcctcctccccttcctcgggaggctccccagaccctggcatgggatgggctgggatcttctctgtgaatccacccctggctacccccaccctggctaccccaacggcatcccaaggccaggtgggccctcagctgagggaaggtacgagctccctgctggagcctgggacccatggcacaggccaggcagcccggaggctgggtggggcctcagtgggggctgctgcctgacccccagcacaataaaaatgaaacgtgaaaaaaaaaaaaaaaaaaaaaaaaaaaaaaaaaaaaaaaaaaaaaaaaaaaa

SEQ ID NO: 75 - DNA, 1701 bp, Homo sapiens
ggccttacggcacagtagagagcttccagggctggctggcgtgggatacccgtaccacagaaatgcagggaccattgcttcttccaggcctctgctttctgctgagcctctttggagctgtgactcagaaaaccaaaacttcctgtgcctcctcctggcggccctcacttttctcctgtgtaaagccatccagaacaccagcacctcactgcatctgcagctctcgctctgcctcttcctggcccacctcctcttcctcgtggggattgatcgaactgaacccaaggtgctgtgctccatcatcgccggtgctttgcactatctctacctggccgccttcacctggatgctgctggagggtgtgcacctcttcctcactgcacggaacctgacagtggtcaactactcaagcatcaatagactcatgaagtggatcatgttcccagtcggctatggcgttcccgctgtgactgtggccatttctgcagcctcctggcctcacctttatggaactgctgatcgatgctggctccacctggaccagggattcatgtggagtttccttggcccagtctgtgccattttctctgcgaatttagtattgtttatcttggtcttttggattttgaaaagaaaactttcctccctcaatagtgaagtgtcaaccatccagaacacaaggatgctggctttcaaagcaacagctcagctcttcatcctgggctgcacatggtgtctgggcttgctacaggtgggtccagctgcccaggtcatggcctacctcttcaccatcatcaacagcctccaaggcttcttcatcttcttggtctactgcctcctcagccagcaggttcagaaacaatatcaaaagtggtttagagagatcgtaaaatcaaaatctgagtctgagacatacacactttccagcaagatgggtcctgactcaaaacccagtgagggggatgtttttccaggacaagtgaagagaaaatattaaaactagaatattcaactccatatggaaaatcatatccatggatctctttggcattatgaagaatgaagctaaggaaaagggaattcattaaacatatcatccttggagaggaagtaatcaacctttacttcccaagctgtttgttctccacaataggctctcaacaaatgtgtgggaagggagggatgtgtgcatcctggaagagaagcaggctgtccctgaaggttctcaaaggttcagtgggaagaactcacgtgctcagcaaagctattgatgatgaccaagtgagagtaattctcctggcagaacatccgggcctcatcccatgacttggtgcttggggagaagtagtaacacttgccctcaaagggcagccagccttcaggacagagatggggtcttgctatgttgccccggctggtctcaaactcctgtcctcaagcgatcctcccacctcggcctcccaaagtatcaagactacagatgcacaccactgcagctggcccaaacctccactttaacaaccacttatcagtctcctgttggaccctgtaccatgccttgggtttgtgatccaagtctaaataaaacctgggctttgggtagaaaggtgaggagattgggagcccacagtccactcccagtttctcaagcaccagcttttgtaactcagggactttgcacctaaaaaaaaaaaaaaaaaa

SEQ ID NO: 76 - DNA, 1959 bp, Homo sapiens
gcggccgccggccccgggactgaccggcctcgccgcacctcccgcaccgactagcgctcccgggcgctcctgcgcccgactcgccctcgcccccactccccggcggggtggcggcggccgggcccccacggcggcggccggagcagcagcagcagcagcaggagcccgcctctatgatgaagttcaagcccaaccagacgcggacctacgaccgcgagggcttcaagaagcgggcggcgtgcctgtgcttccggagcgagcaggaggacgaggtgctgctggtgagtagcagccggtacccagaccagtggattgtcccaggaggaggaatggaacccgaggaggaacctggcggtgctgccgtgagggaagtttatgaggaggctggagtcaaaggaaaactaggcagacttctgggcatatttgagaaccaagaccgaaagcacagaacatatgtttatgttctaacagtcactgaaatattagaagattgggaagattctgttaatattggaaggaagagagagtggttcaaagtagaagatgctatcaaagttctccagtgtcataaacctgtacatgcagagtatctggaaaagctaaagctgggttgttccccagccaatggaaattctacagtcccttcccttccggataataatgccttgtttgtaaccgctgcacagacctctgggttgccatctagtgtaagatagagagaactgggtaggcctctcccaccatgtgcagtctcatggggagaggcttctttcgtttcctcgtcaaacatctgattgacgcttgcaaactgtctgaatttgccatgcaaggttttcaaacaatttgcatgtttttcagatgctttcaaatctttttttaaaaaaatagtgtaaaatattttaataagccaaagccatgtggaatttttgtttagatgccttaactgtgccacaccccacaaccccctatattattttggttgtctatttctcacagcatattttcagttttttgtccatttgacatcagtctgtggtttattttgtcatcagattacttgtgggtatacctaccccaaaattgttttctcattcacagcattagcatattcagcaaatccatctgtggtgggaattaaaaatattattggtattaaagaaatccattcaccccaaaacttgttttacaggattacaattttaattcaaaatttccagatttgggctatttctgtatgatccaataacttattttgtcacagggcttaatttgccatttttggggatttgtcgactcattttgtctgaattttcacaactggtattatgtcactagctacctgatacggctatttcccttataactcaatagtaccttaacacaaagtataactctgtagagttggtgaatattttagggaaatattagcaaaatgcatgtagtaaagacatcttatgaaaactgtattcatggaatttgatttagcatgctcagttgccagttcccattatcgatactctttctttgcagaataccttagaaccgttatttccctcagtgtagattgctcttaaaatgtattcagttatttagtggcccccacaggagtggagtcttgaaatctaattctaaatgccagtcagtgatgatcgcatcacagttgagtgaaatggccttcctgttcagctgttagagactgaagattgttagggcaccttagaatgtctcatcttttctaggttgtcaacaggtactatttgtcacataactaactttcgaggcactggaacatacctgaactaagaattaaatcttttactttatactcacttaaaatcaagaatcccatctaaaacacataggtaccttatctgaaactcttgcacttccccaaccagggcagaaatgaggtgggagaagtttgactaaaatgagggatgggggaaagtaaaaagatgt

SEQ ID NO: 77 - DNA, 2233 bp, Homo sapiens
ctcgcgccagcccttcccgctcttctgttctcgctctatttgccccgctgactgctggcctcgccagctttgccagtcttacgtctctgccgcccccactcccgcccgcgccccatcttcttgcgcgactcgcgcccgctggtccccccctcctcctcccgcgtcctgcctgccccctcctcctgctctcgcaggctccttggcacccaggccgggaggcgacgcgcccagccgtctaaacgggaacagccctggctgagggagctgcagcgcagcagagtatctgacggcgccaggttgcgtaggtgcggcacgaggagttttcccggcagcgaggaggtcctgagcagcatggcccggaggagcgccttccctgccgccgcgctctggctctggagcatcctcctgtgcctgctggcactgcgggcggaggccgggccgccgcaggaggagagcctgtacctatggatcgatgctcaccaggcaagagtactcataggatttgaagaagatatcctgattgtttcagaggggaaaatggcaccttttacacatgatttcagaaaagcgcaacagagaatgccagctattcctgtcaatatccattccatgaattttacctggcaagctgcagggcaggcagaatacttctatgaattcctgtccttgcgctccctggataaaggcatcatggcagatccaaccgtcaatgtccctctgctgggaacagtgcctcacaaggcatcagttgttcaagttggtttcccatgtcttggaaaacaggatggggtggcagcatttgaagtggatgtgattgttatgaattctgaaggcaacaccattctccaaacacctcaaaatgctatcttctttaaaacatgtcaacaagctgagtgcccaggcgggtgccgaaatggaggcttttgtaatgaaagacgcatctgcgagtgtcctgatgggttccacggacctcactgtgagaaagccctttgtaccccacgatgtatgaatggtggactttgtgtgactcctggtttctgcatctgcccacctggattctatggagtgaactgtgacaaagcaaactgctcaaccacctgctttaatggagggacctgtttctaccctggaaaatgtatttgccctccaggactagagggagagcagtgtgaaatcagcaaatgcccacaaccctgtcgaaatggaggtaaatgcattggtaaaagcaaatgtaagtgttccaaaggttaccagggagacctctgttcaaagcctgtctgcgagcctggctgtggtgcacatggaacctgccatgaacccaacaaatgccaatgtcaagaaggttggcatggaagacactgcaataaaaggtacgaagccagcctcatacatgccctgaggccagcaggcgcccagctcaggcagyacacgccttcacttaaaaaggccgaggagcggcgggatccacctgaatccaattacatctggtgaactccgacatctgaaacgttttaagttacaccaagttcatagcctttgttaacctttcatgtgttgaatgttcaaataatgttcattacacttaagaatactggcctgaattttattagcttcattataaatcactgagctgatatttactcttccttttaagttttctaagtacgtctgtagcatgatggtatagattttcttgtttcagtgctttgggacagattttatattatgtcaattgatcaggttaaaattttcagtgtgtagttggcagatattttcaaaattacaatgcatttatggtgtctgggggcaggggaacatcagaaaggttaaattgggcaaaaatgcgtaagtcacaagaatttggatggtgcagttaatgttgaagttacagcatttcagattttattgtcagatatttagatgtttgttacatttttaaaaattgctcttaatttttaaactctcaatacaatatattttgaccttaccattattccagagattcagtattaaaaaaaaaaaaattacactgtggtagtggcatttaaacaatataatatattctaaacacaatgaaatagggaatataatgtatgaactttttgcattggcttgaagcaatataatatattgtaaacaaaacacagctcttacctaataaacattttatactgtttgtatgtataaaataaaggtgctgctttagttttcwraaaaaaaaaaaaaaactcga

SEQ ID NO: 78 - DNA, 728 bp, Homo sapiens
  SITE (168): n equals a,t,g, or c
  SITE (176): n equals a,t,g, or c
  SITE (241): n equals a,t,g, or c
  SITE (724): n equals a,t,g, or c
ccgctgctgtagttccccggctggatgcggtgactggtgccagtgctcaggcgcccgctgcccttgacctcccgccccgcgagccctaactcagcgcaggaggaccggctgccgccgccgccgccgccagatccacacaacttaaagatctgctgtcgagtgaatggngaagtggnccagaacaagcaacaccaaccagatggtattcaagacagaggacctgatagcctgggtggcccangtttgktaccttttacccaggggatgtcatcctaactgggmcccccccaggtgtcggtgtattcaggaaacctcctgtctttctcaaggtaggttagcgaaaagcaaagagcaagggccccaaaggcctggcaggcttgcctcagacttgagaagtacaggcttgtgtatgtgtgtctgacggaagggctgacactgtcatggcctgctctgttgcagaagggggatgaagtccagtgtgagattgaagaactaggtgtcatcatcaacaaggtggtgtgatggctcctgcacaggccctgcacataggatgagggcatctgctcccactcagcctagcccagggaaaggcccagtgacaggtgtggacaggtgccagccctgcaagccgcctcttctcggtagaagggagaaggacagagctctcttcaataaattcgtcrggtcaaagcaaaaaaaaaaaaaaaaaaaaaaaaaggggggncccc

SEQ ID NO: 79 - DNA, 553 bp, Homo sapiens
gggcacgagggccggccactccggcgcttcccaggccctgctcgcgagtccccaccccgattgcgccacccgcgacttcagcccgaggggcggggattttcttggagcgacgggacgcgacgccaatcgcgacgaggcttcgccccgtggcgcggtttgaaattttgcggggctcaacggctcgcggacggctacgcggagtgacatcgccggtgtttgcgggtggttgttgctctcggggccgtgtggagtaggtctggacctggactcacggctgcttggagcgtccgccatgaggagaagtgaggtgctggcggaggagtccatagtatgtctgcagaaagccctaaatcaccttcgggaaatatgggagctaattgggattccagaggaccagcggttacaaagaactgaggtggtaaagaagcatatcaaggaactcctggatatgatgattgctgaagaggaaagcctgaaggaaagactcatcaaaagcatatccgtctgtcagaaagagctgaacactctgtgcarcgagttactgttgagccat

SEQ ID NO: 80 - DNA, 2204 bp, Homo sapiens
ctggcgtgggatacccgtaccacagaaatgcagggaccattgcttcttccaggcctctgctttctgctgagcctctttggagctgtgactcagaaaaccaaaacttcctgtgctaagtgccccccaaatgcttcctgtgtcaataacactcactgcacctgcaaccatggatatacttctggatctgggcagaaactattcacattccccttggagacatgtaacgacattaatgaatgtacaccaccctatagtgtatattgtggatttaacgctgtgtgttacaatgtcgaaggaagtttctactgtcaatgtgtcccaggatatagactgcattctgggaatgaacaattcagtaattccaatgagaacacctgtcaggacaccacctcctcaaagacaacccagggcaggaaagagctgcaaaagattgtggacaaatttgagtcacttctcaccaatcagactttatggagaacagaagggagacaagaaatctcatccacagctaccactattctccgggatgtggaatcgaaagttctagaaactgccttgaaagatccagaacaaaaagtcctgaaaatccaaaacgatagtgtagctattgaaactcaagcgattacagacaattgctctgaagaaagaaagacattcaacttgaacgtccaaatgaactcaatggacatccgttgcagtgacatcatccagggagacacacaaggtcccagtgccattgcctttatctcatattcttctcttggaaacatcataaatgcaactttttttgaagagatggataagaaagatcaagtgtatctgaactctcaggttgtgagtgctgctattggacccaaaaggaacgtgtctctctccaagtctgtgacgctgactttccagcacgtgaagatgacccccagtaccaaaaaggtcttctgtgtctactggaagagcacagggcagggcagccagtggtccagggatggctgcttcctgatacacgtgaacaagagtcacaccatgtgtaattgcagtcacctgtccagcttcgctgtcctgatggccctgaccagccaggaggaggatcccgtgctgactgtcatcacctacgtggggctgagcgtctctctgctgtgcctcctcctggcggccctcacttttctcctgtgtaaagccatccagaacaccagcacctcactgcatctgcagctctcgctctgcctcttcctggcccacctcctcttcctcgtggggattgatcgaactgaacccaaggtgctgtgctccatcatcgccggtgctttgcactatctctacctggccgccttcacctggatgctgctggagggtgtgcacctcttcctcactgcacggaacctgacagtggtcaactactcaagcatcaatagactcatgaagtggatcatgttcccagtcggctatggcgttcccgctgtgactgtggccatttctgcagcctcctggcctcacctttatggaactgctgatcgatgctggctccacctggaccagggattcatgtggagtttccttggcccagtctgtgccattttctctgcgaatttagtattgtttatcttggtcttttggattttgaaaagaaaactttcctccctcaatagtgaagtgtcaaccatccagaacacaaggatgctggctttcaaagcaacagctcagctcttcatcctgggctgcacatggtgtctgggcttgctacaggtgggtccagctgcccaggtcatggcctacctcttcaccatcatcaacagcctccaaggcttcttcatcttcttggtctactgcctcctcagccagcaggtccagaaacaatatcaaaagtggtttagagagatcgtaaaatcaaaatctgagtctgagacatacacactttccagcaagatgggtcctgactcaaaacccagtgagggggatgtttttccaggacaagtgaagagaaaatattaaaactagaatattcaactccatatggaaaatcatatccatggatctctttggcattatgaagaatgaagctaaggaaaagggaattcattaaacatatcatccttggagaggaagtaatcaacctttacttcccaagctgtttgttctccacaataggctctcaacaaatgtgtggtaaattgcatttctcttcaaaaaaaaaaaaaaaaaaaatgacc

SEQ ID NO: 81 - DNA, 2880 bp, Homo sapiens
ggcacgagggtaactgggggtgttatactgagcagcagcgttgtgatgggtattggcattgcccaaatggaagggatgaaaccaattgtaccatgtgccagaaggaagaatttccatgttcccgaaatggtgtctgttatcctcgttctgatcgctgcaactaccagaatcattgcccaaatggctcagatgaaaaaaactgctttttttgccaaccaggaaatttccattgtaaaaacaatcgttgtgtgtttgaaagttgggtgtgtgattctcaagatgactgtggtgatggcagcgatgaagaaaattgcccagtaatcgtgcctacaagagtcatcactgctgccgtcatagggagcctcatctgtggcctgttactcgtcatagcattgggatgtacttgtaagctttattctctgagaatgtttgaaagaagatcatttgaaacacagttgtcaagagtggaagcagaattgttaagaagagaagctcctccctcgtatggacaattgattgctcagggtttaattccaccagttgaagattttcctgtttgttcacctaatcaggcttctgttttggaaaatctgaggctagcggtacgatctcagcttggatttacttcagtcaggcttcctatggcaggcagatcaagcaacatttggaaccgtatttttaattttgcaagatcacgtcattctgggtcattggctttggtctcagcagatggagatgaggttgtccctagtcagagtaccagtagagaacctgagagaaatcatactcacagaagtttgttttccgtggagtctgatgatacagacacagaaaatgagagaagagatatggcaggagcatctggtggggttgcagctcctttgcctcaaaaagtccctcccacaacggcagtagaagcgacagtaggagcatgtgcaagttcctcaactcagagtacccgaggtggtcatgcagataatggaagggatgtgacaagtgtggaacccccaagtgtgagtccagcacgtcaccagcttacaagtgcactcagtcgtatgactcaggggctacgctgggtacgttttacattaggacgatcaagttccctaagtcagaaccagagtcctttgagacaacttgataatggggtaagtggaagagaagatgatgatgatgttgaaatgctaattccaatttctgatggatcttcagactttgatgtgaatgactgctccagacctcttcttgatcttgcctcagatcaaggacaagggcttagacaaccatataatgcaacaaatcctggagtaaggccaagtaatcgagatggcccctgtgagcgctgtggtattgtccacactgcccagataccagacacttgcttagaagtaacactgaaaaacgaaacgagtgatgatgaggctttgttactttgttaggtacgaatcacataagggagattgtatacaagttggagcaatatccatttattattttgtaactttacagttaaactagttttagtttaaaaagaaaaaatgcagggtgatttcttattattatatgttagcctgcatggttaaattcgacaacttgtaactctatgaacttagagtttactattttagcagctaaaaatgcatcacatattcatattgttcaataatgtcctttcatttgtttctgattgttttcatcctgatactgtagttcactgtagaaatgtggctgctgaaactcatttgattgtcatttttatctatcctatgttaaatggtttgtttttacaaaataataccttattttaattgaaacgtttatgcttttgccaacacatcttgtaacttaatatactagatgttaaggttgttaatgtacaaaaaaaaaacccttatactcacctgcgttttcatttgtttgacatttgtctattattggatttcattatcatatgaacttgtcagtgggaaacaaactgtctaaaaatttttctcttacgtttaacatacaatcatgtgaaatttaggcagagttcgataaattactggcaaaaacaaaactcttttataaagattttctaatgttgactttaatactctaacatggtacaaaccaaatggtaaaatcccaagtcatttcttttttcatctctatttagcaacagaattaagtggatgaagatattctactatgcattaaatcttgaactttataaaacatgtacaaaaattgtacaagataagttccacctggtaatgtctttccctaatacagggttgcgcttgcattggaccctagggatttgcactaaaattatatcaaggtctcagatgagcttagtgcacaagcactatcactttaaatactattatttgctaccacagcaactatatatttccatagcttttggctgggggcgggggacatttttattacaacttgaaattgctttgctggtttcatatttatttgttgtatttaaaaaatacattgttgtaagagtgattttttcaatatattttattcctgggggggatcatgctacactctcaaaagaaaattaagaaatcattcagatcatcccccctttttaagtagtgtgaattgcaaaacccaacatattttttttactgtcagttgcggtttatttattctttaactgtctgttttagtagtttaatgattatgaaaaatgtatctgtgtgtgatttgctatttattaaattttaagtactttgctgaatgtcattttaaagcatgtttgaagtcttgtgtatttgtctgtgttaatgctgtcaggaggaactgactaagatgttttaatatgtatcaaaaattaaaatgattttttttattgccttgaaaaaaaaaaaaaaaaaa

SEQ ID NO: 82 - DNA, 2549 bp, Homo sapiens
ccacgcgtccgggctctttagcatcagacctggcctagggaccctggcagcacctgacctggtcgtcagggcactgtgtgccacccagaagcagggtgaggcctgtgcttctgagtgctgctggcctcagctctggtgctccaggccatgcgcagaagtgagaaaacagtagtagaaacccaagaccacccagcctggtcctctgacaccccctatgccctgcagatgtggacgagtgtgaggctggggacgtgtgtgacaatggcatctgcagcaacacgccaggatctttccagtgtcagtgcctctctggctaccatctgtccagggaccggagccactgcgaggacattgatgagtgtgacttccctgcagcctgcattgggggtgactgcatcaataccaatggctcctacagatgtctttgcccccaggggcatcggctggtgggtggcaggaaatgccaagacatagatgagtgcagccaggacccgagcctgtgccttccccatggggcctgcaagaaccttcagggctcctatgtgtgtgtctgcgatgagggcttcactcccacccaggaccagcacggttgtgaggaggtggagcagccccaccacaagaaggagtgctacctgaacttcgatgacacagtgttctgcgacagcgtattggccaccaacgtgacccagcaggagtgctgctgctctctgggggccggctggggcgaccactgcgaaatctacccctgcccagtctacagctcaggtcaggagccgggcaggccccttcccagatcttcagtttcttcatctggaagccaaatgtgggaaatggcgccccctggcagttgggaaataggcggcgggctgcagccctaagcccacgcgcgcactcagtcctgcctcttccctccccacggccgccctgcccctgcagccgagttccacagcctctgcccagacggaaagggctacacccaggacaacaacatcgtcaactacggcatcccagcccaccgtggtaagcgccctgcggctccgcccgccccgcgccctctcaccccgggttgggctcgcccggatcccgccgggactcgctgggtcagctgcccgcgccgggtaagccccgcccgcaccttcctcgcaggccccgccctgtaggccccgcccctcctgtaggccccgcccggggatggcttcgctccggtggtgcgcccagcccacgcctccgggctgcagctgcgggaccggagcggccagtgtttgtcaccccgcagacatcgacgagtgcatgttgttcgggtcggagatttgcaaggagggcaagtgcgtgaacacgcagcctggctacgagtgctactgcaagcagggcttctactacgacgggaacctgctggaatgcgtggacgtggacgagtgcctggacgagtccaactgccggaacggagtgtgtgagaacacgcgcggcggctaccgctgtgcctgcacgccccctgccgagtacagtcccgcgcagcgccagtgcctgagcccggaagagatggacgtggacgagtgccaggacccggcagcctgccgccctggccgctgcgtcaacctgccgggctcctaccgctgcgagtgtcgcccgccctgggtgcccgggccctccggccgcgattgccagctccccgagagcccggccgagcgtgccccggagcggcgcgacgtgtgctggagccagcgcggagaggacggcatgtgcgctggccccctggccgggcctgccctcaccttcgacgactgctgctgccgccagggccgcggctggggcgcccaatgccgaccgtgcccgccgcgcggcgcggggtcccattgcccgacatcgcagagcgagagcaattccttctgggacacaagccccctgctgttggggaagcccccaagagatgaggacagttcagaggaggattcagacgagtgtcgctgcgtgagtggccgctgcgtgccgcggccgggcggcgccgtgtgcgagtgtcccggcggcttccagctcgacgcctcccgcgcccgctgcgtggatatcgacgagtgccgagagctgaaccagcgcgggctgctgtgcaagagcgagcgctgcgtgaacaccagcggctccttccgctgcgtctgcaaagccggcttcgcgcgcagccgcccgcacggggcctgcgttccccagcgccgccgctgacgccgccgacgccgccctcggcccagacctcggtgatcactgagggatttccgcgagctcggcctcacttctgccccgacttgtggctcggacccagggaccttcagggcccgcagaccctcccggcgccttgagacccgaggcgcccctaccggcccccctccccggttagcgggcggttgtaaggtctccggcgggcgctgcctgccttcctcccagagggtgtttcctagaaactgataaatcagatcgtgcctctttaaaaaaaaaaaaaaaaaaaaaaaaaaaaaaaaaaaaaaaaaaaaaaaaaaaaaaaaaaaaaaaaaaaaaaaaaaaaa

SEQ ID NO: 83 - DNA, 685 bp, Homo sapiens
  SITE (569): n equals a,t,g, or c
  SITE (572): n equals a,t,g, or c
  SITE (585): n equals a,t,g, or c
  SITE (590): n equals a,t,g, or c
  SITE (599): n equals a,t,g, or c
  SITE (642): n equals a,t,g, or c
cgggtcgacccacgcgtccgctgatagctcgatgtgacggagtctcggattgcaaagacggggaggacgagtaccgctgtgtccgggtgggtggtcagaatgccgtgctccaggtgttcacagctgcttcgtggaagaccatgtgctccgatgactggaagggtcactacgcaaatgttgcctgtgcccaactgggtttcccaagctatgtgagttcagataacctcagagtgagctcgctggaggggcagttccgggaggagtttgtgtccatcgatcacctcttgccagatgacaaggtgactgcattacaccactcagtatatgtgagggagggatgtgcctctggccacgtggttaccttgcagtgcacagcctgtggtcatagaaggggctacagctcacgcatcgtgggtggaaacatgtccttgctctcgcagtggccctggcaggccagccttcagttccagggctaccacctgtgcgggggctctgtcatcacgcccctgtggatcrtcactgctgcacactgkgkttatgacttgtaccttcccaagtcatggaccatncangtgggtctagttncctgntggacaatncaaccccattccacttggtggagaagattgtctaccacagcangtacaagccaaaaagctggcaatgacatcgccttatgaactgg

SEQ ID NO: 84 - DNA, 647 bp, Homo sapiens
  SITE (16): n equals a,t,g, or c
  SITE (26): n equals a,t,g, or c
  SITE (32): n equals a,t,g, or c
  SITE (36): n equals a,t,g, or c
  SITE (644): n equals a,t,g, or c
  SITE (645): n equals a,t,g, or c
  SITE (646): n equals a,t,g, or c
  SITE (647): n equals a,t,g, or c
cgggactttctaacgngagcttctcntgtaantccnacaaaagctggagctccaccgcggtggcggccgctctagaactagtggatcccccgggctgcaggaattcggcacgagggagctgcagcacagcatccccctgggccccaacgtcctcccggtctgtctgcccgataatgagaccctctaccgcagcggcttgttgggctacgtcagtgggtttggcatggagatgggctggctaactactgagctgaagtactcgaggctgcctgtagctcccagggaggcctgcaacgcctggctccaaaagagacagagacccgaggtgttttctgacaatatgttctgtgttggggatgagacgcaaaggcacagtgtctgccagggggacagtggcagcgtctatgtggtatgggacaatcatgcccatcactgggtggccacgggcattgtgtcctggggcatagggtgtggcgaagggtatgacttctacaccaaggtgctcagctatgtggactggatcaagggagtgatgaatggcaagaattgaccctgggggcttgaacagggactgaccagcacagtggaggccccaggcaacagagggcctggagtgaggactgaacactggggtaggggttggnnnn

SEQ ID NO: 85 - DNA, 462 bp, Homo sapiens; identical to SEQ ID NO: 11

SEQ ID NO: 86 - DNA, 266 bp, Homo sapiens
aaatgcttctgggtaaaggagctaataggtagtagtaaacttagcccttcgaaaaacaggaagggatggatcctaggggagaggaggaaggattggctttagaggaaagatgtcctttacgtgaggaaaaggaagaaaaggtgggtttagatactaaatctgtaggtttsctgttaggaaattaaggacttttcacctttatctctgaaatttctctggagttagcaaggcaaggtcatacactgagaaggagggatgaggcattt

SEQ ID NO: 87 - DNA, 364 bp, Homo sapiens
  SITE (280): n equals a,t,g, or c
  SITE (332): n equals a,t,g, or c
  SITE (352): n equals a,t,g, or c
ttaagctgagtcccaaagggtggaggagtcagtaaggtgaacaggagggataatcttccagattgaaagacaatttgaatggcagctctgggggaagaagaatgtggcacattgaggaactgaaggcattctgtgtggccaagggtattgagtgagtagaaagtgttcaagttaataacaactaaagtatttatatttaaaccttacaattacctgtgagagggcttattattatcatcctcattttacagagaaggaaactgaggcataaggaaattanatggttaaatagcttgcctaatgtcacatagctctaaataggaaggccaggntttaaacccaaggagtgtantcccaaagttta

SEQ ID NO: 88 - DNA, 586 bp, Homo sapiens
ctggagcaggtccctggcctctcctgggagcgagtttgagtgcagtctcccgtcagacctcctgcaatggaatctgcatttctgtaagcttgctcagcaagattgagagcagggtttggcatttctagcgagagtcccaaaaggaaagagggactgtacctgaagataaaaataacaaagaaattcctgcacctaaatctatgcagtgaaactaaatcagagagaaactattaagcagccagattttaaaaagacatcactttccgaggagctgtccccttatcaacagaaatgggagcttgaagacagtcaaatgatatcttccgtgagttgaaagatgcactgccagcctagaattatacacccagggagaccatctttaaagaatgaaggtgaaatcaaggcattttcaggcmaaccaaaagcttacyttggsaccagcagacctgcacaaaggatattctcaggcaggagggaactgaccccagagggaaattttgggaatacgggtctgtggaccttatttaaccgggattacaagatacgtggggtgcaacattttgatgtggtgcaccgtccgagagga

SEQ ID NO: 89 - DNA, 489 bp, Homo sapiens
  SITE (451): n equals a,t,g, or c
  SITE (454): n equals a,t,g, or c
  SITE (465): n equals a,t,g, or c
cgctctgggacactcagtctgatggggcaggctggtcagaagacatagagccatggtgtgtttggaactttcacagagggaagcctggggctcgggaagcccggaaaagaygccggcgcactgagggcttgtacaggtgccactgtgccgaaggtggctacgagggaggcaggtgtatgggtgagggtgagtgcagtgtggctggaggcttagggaaaggtgagtaggacggcgagagacccacggggaatgagggctggacctcagcctgagtgagtgtgtttggtggggtgagcagtgatgtcagtccctcctgggagctgctgtgatttggggctttctactttattcactcaacaaacgtttctcagaatggarggtgctcggggccgtaaggcacagatactgatgtkgcccttaaggtcacaaggtccaaggttcaatcccagtncancattatccagngtgcaattttgacatttgcgtaac

SEQ ID NO: 90 - DNA, 565 bp, Homo sapiens
  SITE (556): n equals a,t,g, or c
ccctccttatgttaggccagtagttatctaactatggccttatgggactctggtatcccaccagccaaagagaggactcttcccaaattatagaacaaaaataagccaaaggattggagtgtttcaaacacatgctttcgtcttataaatgttctgtaaaccctccatgactatgacaaaagttaaaaacaaatgccagacaaatgttgattcttccttggtttctgggacgccaccctctcctggttctcctcctgtctccgtctcattttggggccacccactctttctgaagcatctcttcaatgctggtcttcctcaggttctgtccctgtgtctctgcccatctgcctccaacactcacgagtgatctcaccaatgtccatgagctcagtgggcccctccttttttttttttttgagactgagtctcattctgtcactcacgctggagtgtagtggcacaatctcagctcactgcaacctccccctcccaagttcaagcgattctcctgcctcagcctcctgagtagctgggattgcaggtgtgtgccaanacgcctgca

SEQ ID NO: 91 - DNA, 819 bp, Homo sapiens
  SITE (15): n equals a,t,g, or c
  SITE (24): n equals a,t,g, or c
  SITE (90): n equals a,t,g, or c
  SITE (184): n equals a,t,g, or c
  SITE (788): n equals a,t,g, or c
cccaatcgggaaccncccccattnaagaagggccatcttccagaacccccgggttggggcccccaattcgggccagccaggaacacacgntgccagccaggagctccaaggggtgcaatgccasccamtgggtgtgracctaaattgggccacctgggtactgatatccagtaattttgkttgnttgttgtttgttttgcttcctgttctgggaagcaactttgatgcatactgtattcatattctttatgcaacctgactggcttgaccaaaaccaggatttaaacagcagagtaattagagagtttatggaagagaagagtctggggatgttagggacttgggtagagtcctgcccttccaggacattctcctccctgctgcttgctcagtgtctgttgccttccaaggcttctccactaggcaggagatgtggcaacagatagatatgtgccattccagcttcactgcccaaggcaaagatgatttctttctccccaggattttgatattccagggggccatgtgcatgcttaggaccatttctggcatgagctccattcttggctcagcctaggttacagtcatgcatatcagaggctgtgatgagcagggccatgaataattcccaaagcgagggggtctttgggctcattgctgtgtgggccagcccacattatcatacactaaaaatatattttctaaatgccccatgttgtctycactctcacaagagtcaagamgtgggaggcctggcttttccttattttccttgtgagctaacagantggcggtacattcgtaaaaaggtgactctaa

SEQ ID NO: 92 - DNA, 652 bp, Homo sapiens
ggcacgagcggagacagatgtcagtactacgtgtgccaccactattgtgtgaattctgaatcatgtaccattggggatgatggaagtgttgaatgtgtctgtccaacgcgctatgaaggaccaaaatgtgaggttgacaagtgtgtaaggtgccatggggggcactgcattataaataaagacagtgaagatatattttgcaactgcactaatggaaagattgcctctagctgtcagttatgtgatggctactgttacaatggtggcacatgccagctggaccccgagacaaatgtacctgtgtgtctatgctycaccaactggtcargcacacagtgtgaaaggccagccccaaagagcagcaagttgatcatwtcagcacaagaagcattgccatcattgtgcctctcgtcctcttggtgactttgataaccaccttagtaattggtttagtgctttgtaaaagaaaaagaaggacaaaaacaattagaagacaacctattatcaatggaggaataaatgtagaaattggcaatccatcttataacatgtatgaggtagatcatgatcacaacggatggaggtcttttagatcctggctttatgatagacccaacaaaggccaggtacatagggggaggacccagtgctt

SEQ ID NO: 93 - DNA, 736 bp, Homo sapiens
  SITE (68): n equals a,t,g, or c
  SITE (709): n equals a,t,g, or c
  SITE (735): n equals a,t,g, or c
ggtaaaaaaaccctgtaaaaaaacccattggggtcctaggggaagcttttgccccctttgtgaatccnggaagtaattcgccttccttagaaagcctaactaatctccctgcatcgagctctgatcccatcaattcctccgtgaagtctgggtattaaaccagccccaaagaagaacagaaaaggggattatcctcttccactaggacacatgccttttctggcatgggaagataaagctctctgatgataaatttccaagtacattttaatgagaaatgacatggattaagaaagagatagagaaaataagagatgaaaggcattctatttgttggacatttttagccacagttctccttgtacacccctcaaaaaagaaagagaaaagtaatcaacagggaggaacaagggaacacaaagaggagataagaattttcttctacatgtattctgcgtttctcagccttctgtggtgttactatcatcaatgaaaaggcatttaagatccttaagttagaaaaatcttttctgcccaattccccacttcttgtttggaaacaagaacatgctctgcaagacctgtaagcacagatttaawtttccatcatgatgaatgatgataaaattttaaaaaatggtgaacattcatatagtactaactatatgccaagcactgttctaagtaccgtgcaactattagttcattnaaatccttacaactccactatgactnc

SEQ ID NO: 94 - DNA, 1166 bp, Homo sapiens
  SITE (307): n equals a,t,g, or c
  SITE (308): n equals a,t,g, or c
  SITE (1132): n equals a,t,g, or c
  SITE (1137): n equals a,t,g, or c
  SITE (1138): n equals a,t,g, or c
actggcaaaatgtggcagatttcagggatgcaggtggatccttaactgaggtcaaggtggaagaggaagaaagggatccgcagagtcctgaatttgaaattgaggaggaggaagaaatgttgtcatccgtcataccagattccaggagagaaaatgaacttcccgatttcccccacattgatgagttttttacccttaactcaacaccatctagatctgcatatgatgagcctcatttgctcgtaaatattgagaaacagaaactagagttggaaaaacgacgactggatatcgaggccgaaacggnncaggtagaaaaggaacgcctacaaatcgagaaagagaggctgcggcatttagacatggaacatgagcggcttcagctagagaaggagcggctgcagattgaaagagaaaagttgaggttacagatagtcaattcagagaaaccgtccttggaaaatgaacttggtcaaggagaaaaatccatgcttcaaccacaggacatagaaacagagaagttaaaacttgagcgagaacgcttgcaactggaaaaggataggctgcagtttttgaagtttgaatctgagaagctgcagattgaaaaggaacgcttacaggtagagaaagacagacttcgaattcagaaagaaggacacttgcagtgatttttccaggcttccatttagcaaatgtttgaaaactctagatttttctcatatcaggtgatataatgatggttgctggattagctgtggtttcttgtctaatgtcagtgttcagtaggaaaaagttatatgtggataactgtatgcctaagtagtatataaaagctgtgccctagcgtaaacagtatagcagaaacttactgtgctggactctttaccttataatattacatagagtcttgtattgtctgtgtacccagagtttacaattatgtccatataaaattctagcccagaagttctcatctggggtagattttggccttcagaagaccaatttggtgatgtctggagacatgttgggttgtcaaaactggggtggggaaaaggttgctactgtgcaatgcatacctcctcaacacccccccacactgcagtgaaagaattttccaacccaaaatatncattnntccctgaagttggagaaaccctgttcct

SEQ ID NO: 95 - DNA, 2046 bp, Homo sapiens
tcgacccacgcgtccgcggacgcgtggccaaaagaagaaagcactaaaaactcaactagcaggaagcggttttgcttccattgagccacgtcggtggtgtcatcctacatgtagcataatagagtctctcagcctttgcttactggtgtttccgacagtattaacccagtgcgtggcatgtctttgaagcaaagcctgtcccgctagcctgtgtgttcacacaccaaaggagaagggtaggcgaggggttcggagtgtattttcaggttggaatgtgaaggttcctggcttccatgtgacttgtaagtgtgccttgttttttatttaaactatgtctgtagttgacaaaagtggcttcatcacaaatttttttaaacgtttctactttggggttccatttaggagctttctagaaagttgaggatgtttgaagcttcccttctgtgttccagtttgatatgggttaggttaaggaaaaggagatggtctcgatgtcatggatttaaagtcagcatttggattacaacacacattattgtgtgtcgagaggcagcattggaaagagcctgattttctaaaatatgcatcaagtgcataaattacaaatcagagctgagtggggaggtgcttcagcagcagcgggatcaatacgatttccactgggaagagacaggaattctacctacacataggaaggccaaggttgatccacttaaccttgttattgtaattttaaagctggtatcggtagctgggaagctttatgtgtgtgtatgtcagctcagcatcttttaatcgtgtctgattttactctcgttacttctcgctgttggaagcatctctgggtttcttgtggcgtctggtgtggaatggccttcctctctaggtgcctgaggtgtccgctgacgggtggcctctcacccccctctagagaaacctgacatttacaatggattgtatttgtccggcaaaaaaggcggattcattcatagagcagaaagaacctgttggcgtaaggtcttccactagttagatggtttcttttggggaaatgtttatatttggtaacttctagaaagccagaaaatggactctgatttcatagcattttgataaaatgccacaaaataagggctatagagagatttttacaagtcagattttttgttccccaaatcttttaaatgaagccagtgactcccagttctcaacacatggccccagtcaagacagaacaccatggaaaaaaccctgtaagtattatggcactctccgaatcctcctgaaggcatttcctctacagacatagtgttacaggaagtgaaatgcaaatgtgcaattttttttaaaggagcttttaaacaaagtaataataattggtgttgagaacatcagttgccttattctaagatttcataaggctgagtttgcacgcttggacttcagttctgctagcatgtaaagagtggtggactttaaaaccgtaagaggtatcattacaagtcacctggaacagactcaaagaacaggttctttgggcaacagacaaagaagaatcaagttctgtgctgtcccgtgagtgtgtctgagtaccattcactggagttgctgcttaggtctgggacgtgtgtgtgactcttaacaattgctgtctgaaaatgagagagaagacttcggaagcacattgtgttcataatgtactccacaatggccagtccaattgctatctatttttttatccagaggcttaattaaatgatgtggtaaaatgatgtttgagcattaagacaatgtaattctttatttctgggtggaaagatataccggattaaatttatctgtttaaaaaaatgacaaaagttatcaccaaaaccccctttcccatcttgcactgtttgttttggattgggtttgggggaaagagatgtttttcttagttgtctactttgtttgaacacttttgttgtggttcaagtgctgttttgtgtgttgggaccaaacagttgtcaataaactttacaagcgagcatctaaaaaaaaaaaaaa

SEQ ID NO: 96 - DNA, 618 bp, Homo sapiens
  SITE (515): n equals a,t,g, or c
  SITE (540): n equals a,t,g, or c
  SITE (591): n equals a,t,g, or c
  SITE (612): n equals a,t,g, or c
gagcaataatgtaaataacagcctagaatcatcctagtgcttccatcagcagaaggcttgctaaaaaaggcgtgagcagcggcgtctgcgaatgggaacatcaaagactctaggctgttaaatagatttctcaataatgtaaataactaaattgttctctgcatatagcaggaaaactagcatgaaatattgtttcaggccctgggttctatgtgacactacattaggaattggattgtttgggtttgctttgtgtttttgaggtagaggaagaaatgggaatcttttttttctcttccaggagtcagtggaagaatagttctctagctaaggaatggacatacctttgttttaaaatattttatacttacaaaaatctagaaatggagagggaactgttttgaataaggatttaaaatacctgcacaaggatagagagaaactatgtgactcattctgtgaaaagacttcttgcagttgtgagttatttagaaatgatcaaaatttggaattangctaatccatttagggattcctaanatttggactcacagagacttattgctaaacaacttgaacccttggggttgnccttaaacaattgctttgaantaaagc

SEQ ID NO: 97 - DNA, 984 bp, Homo sapiens
cggcccgagagctgcgccgggagagctgtgccgcgagcctccgcctcttttttggcaccgcacagtggatccctggaggccgagcgccacgccgcccgggtacccggcagatcgcgaggtggaagggccgtcgctgcgggggacagcgttccgaggcagttggtcctctccgggatgccgtaggcatcagctgaccggcccagcccacgtgactacaggggcacttgakgggaatcatggcagcatccaggccattgtcccgcttctgggagtggggaaagaacatcgtctgcgtggggaggaactacgcggaccacgtcagggagatgcgcagcgcggtgttgagcgagcccgtgctgttcctgaagccgtccacggcctacgcgcccgagggctcgcccatcctcatgcccgcgtacactcgcaacctgcaccacgagctggagctgggcgtggtgatgggcaagcgctgccgcgcagtccccgaggctgcggccatggactacgtgggcggctatgccctgtgcctggatatgaccgcccgggacgtgcaggacgagtgcaagaagaaggggctgccctggactctggcgaagagcttcacggcgtcctgcccggtcagcgcgttcgtgcccaaggagaagatccctgaccctcacaagctgaagctctggctcaaggtcaacggcgaactcagacaggagggtgagacatcctccatgattttttccatcccctacatcatcagctatgtttctaagatcataaccttggaagaaggagatattatcttgactgggacgccaaagggagttggaccggttaaagaaaacgatgagatcgaggctggcatacacgggctggtcagtatgacatttaaagtggaaaagccagaatattgagttatttcttaacaagtttcgagagagaagggagcaagacaagagcaagcaacggctattaaatgtcacaatcctttaatta

SEQ ID NO: 98 - DNA, 478 bp, Homo sapiens
  SITE (374): n equals a,t,g, or c
  SITE (433): n equals a,t,g, or c
  SITE (435): n equals a,t,g, or c
  SITE (463): n equals a,t,g, or c
gggcacgagctcgtgccgcttcattttagtcatactgtagactcattaaaaccagggttcaaggactcacctaagtgcagccaagctggaagaattcattccgagtttggtgtcgaattctctcaaatcaaccagccagactctaactgtaccctcagcattgccaacaggctctacgggacaaagacgatggcatttcatcagcaatatttaagctgttctgagaaatggtatcaagccaggttgcaaactgtggattttgracagtctacagaagaaacgaggaaaacgattaatgcttgggttgaaataaaactaatggaaaagtcgcaaatctctttggaaagagcacaattgacccttcatctgtaatngtcctggtgaataccatatatttcaaaggacaaaggcaaaataaatttcaagtaagagngncagttaaaagtccttttcagctaagtgnaggtaaaatgtactt

SEQ ID NO: 99 - DNA, 1354 bp, Homo sapiens
gcggggacggggtcagtgccaagatgtcgacggcggcggttccggagctgaagcagatcagccgggtggaggcgatgcgcctagggccgggctggagccactcgtgccacgccatgctgtacgccgccaaccctgggcagctcttcggccgcatccccatgcgcttctcggtgctgatgcagatgcgtttcgacgggctgctgggcttccccgggggcttcgtggaccggcgcttctggtcgctggaggacggcctgaaccgggtgctgggcctgggcctgggctgcctgcgcctcaccgaggccgactacctgagctcgcacctgaccgagggcccacaccgcgtcgtggcgcacctgtacgcgcggcagctgacgctggagcagctgcacgccgtggagatcagcgcggtgcactcgcgcgaccacggcctggaggtgctgggcctcgtgcgggtcccgctgtacacccagaaggaccgagtcggaggcttccccaacttcctgagcaacgccttcgtgagcacggctaagtgccagctcctctttgccctcaaggtgctcaacatgatgcccgaggagaagctggttgaggccctggctgcagccaccgagaagcagaagaaggccctggagaagttgctcccggcctcctcttgagggctgcctgagctggtggcaccctcccctgggccggaagactgggaattcctgctaagtgtggcttctagagtgtttgtgtgtaccccgcttctgactgcctagggcgagtgggcatcctgtcatcatctccactgtcccaagcagtcactaggtggcggccgggccagctggaacccagcccatcctctcaggcagagcagggtggtccgggcacactgggcctgcctctccagcctcaggatgctcttgtttattctgggctcagaccctcctcttgtacgtctcatcacagctggtagagacccaggagtgcctgattgtcccacaggggtggcgcacagctctgggaccactcagaagatgggatgtgtgggtggaggatgccttgtctcggtcagctcattcctgcctccttcctgagccagttcagggcctgggggagagccagcttggggtaggaagttaataatactgttaatttgggttgttgttggatttactttgctagattttctctttcaccacgtgtgaactgtgggtgaggtttcaaagtagcttcaccccacgtggcttggttcccagggacagtcagggcctcgggggcccagctatgtacaacgaagctgtcgaaggagaagacaataaagtcgctccgcagctgcaaaaaaaaaaaaaaaaaaaaaaagtcgagc

SEQ ID NO: 100 - DNA, 378 bp, Homo sapiens
  SITE (12): n equals a,t,g, or c
  SITE (15): n equals a,t,g, or c
  SITE (51): n equals a,t,g, or c
gaagctagcggnaancgcgcgctgcaggtcgacactagtggatccaaaganttcggcacagcgtaaaatccaaaacttgttttttcactcatgaatccttctggcaacgattgagctcatattactaaatgcaacaatatatttaagtagtaagcacagtgcctgacccatggtatgcattcagtgttagcaatttaatttttatgatgattattctttgtgattagaaggcgattgaaaatcagtaagttctataggtacttgtggcctcaaaacattattgatatggrtagctatttataagttttagaccatgtgagttttatagcatatgmccatgttgtaaagtaattttacacacaaatggcacacatacac

SEQ ID NO: 101 - DNA, 377 bp, Homo sapiens
  SITE (34): n equals a,t,g, or c
  SITE (147): n equals a,t,g, or c
  SITE (377): n equals a,t,g, or c
aaaagcagagggtcccgcaacgggagcggaaggncatgacttctccttgtttaagctttcggacacggagatgcgggtgaagatctcaccacagcttctgctagccacacaccgcttcatggccacagaagtggagccctttaagtntctgtacctttcggagaagatcctgctccggctcctgaaacatcccaacgtgatccaggagctgaagtttgatgagaagaacaagaaggccccggaacactacctctaccagcgcaaccgccctgtggactactttgtsctgcttctacagggtaaagtggaggtggaggttggtaaggaaggccttcgctttraaawtggagcctttamttactatggcgtcccagccn

SEQ ID NO: 102 - DNA, 250 bp, Homo sapiens; identical to SEQ ID NO: 29
  SITE (222): n equals a,t,g, or c
  SITE (247): n equals a,t,g, or c

SEQ ID NO: 103 - DNA, 407 bp, Homo sapiens
  SITE (359): n equals a,t,g, or c
  SITE (375): n equals a,t,g, or c
  SITE (391): n equals a,t,g, or c
  SITE (396): n equals a,t,g, or c
gggtcgacccacgcgtccggcgagagagagattgtgatggcggctgcgattttagctgagaaggtgccggtggacagcgcagaagagagggagcagcccctggcgtctgcgcggraactggctgcccagaagcgcgaacagaggctgcgcaaattccgggagttgcacctgaagcggaatgaagctcgtaaattaaatcaccaggaagttgttgaagaagataaaagacttaagttacctgctaactgggaagccagaaaagctcgtctagaatgggagctacaggaagaagaaaagaagaaggaatgtgcggctagaagggaggactatgagaaagtgaactgctggagttcatggcngaagatgcagaaagtngggagaggaagaagangaggnaaaaccccgac

SEQ ID NO: 104 - DNA, 353 bp, Homo sapiens
  SITE (227): n equals a,t,g, or c
  SITE (251): n equals a,t,g, or c
  SITE (295): n equals a,t,g, or c
agtgccaagtaatcgaagccaactaccactcttccaatgcctaccacaactccacccatgctgccgacgtcctgcacgccaccgctttctttcttggaaaggaaagagtaaagggaagcctcgatcagttggatgaggtggcagccctcattgctgccacagtccatgacgtggatcacccgggaaggaccaactctttcctcctgcaatgcaggcagtgaacttgntgtgctcctacaatgacacctgcntgttcctggagagtcaccacaccgccctggccttccagcctcangggtcaaggacaccaaaatgcaacattttcaagaatattgacaagggaaccattatcg

SEQ ID NO: 105 - DNA, 520 bp, Homo sapiens
  SITE (448): n equals a,t,g, or c
  SITE (483): n equals a,t,g, or c
  SITE (503): n equals a,t,g, or c
gattccattgaaagctacatgcgaacctggatgtaagtttggtgagtgcgtgggaccaaacaaatgcagatgctttccaggatacaccgggaaaacctgcagtcaaggatacttgacaatgactggggacaattttggttgtcataactggatgtgggaggtactcccggcatctagtgaatggagcccagggatgccgctaaacatcctgcagtgcacaggacagtccccacaacaaataatgatttgtgtcaacggaagttaagaaaccctggcatgaagaaatcttcaataattcaaaaagggtccccagtcctataaggaagttgaacaaagagcagtaaatccaattcagctgcccttggagaatggagtttcagagaagactggacacccactycactctaccactyccagcccttgctgccaagcccagagccttccttgnccttgtggcaagcctgatcaaagtccacgtacatncattaatggtgacaggcctnagccttaactcatgtct

SEQ ID NO: 106 - DNA, 491 bp, Homo sapiens
  SITE (52): n equals a,t,g, or c
  SITE (417): n equals a,t,g, or c
  SITE (437): n equals a,t,g, or c
  SITE (477): n equals a,t,g, or c
ccggtgaataaataatctgtgttggcaataactatcccaaacatataaaganatgggcaacgcatgcccgaagagccatgctgtttaataaaccagaaacggcactgtgcgatctgcggcaaccattggcgatcccatccgatttcggttcagttcatcatgaagtcgaactggcggtgttgattggcgcgacatgcgtcaggctacggaagagcatgtccgcaaagccattgccggttatggcgtggcgctcgatctgacattgcgtgatgttcagggaaaaatgaagaaagccgggcagccgtgggaaaaggctaaagcgtttgataaactcttgtccgctttccgggtttattccagtggctggtagcctgtgacggtggagcaagttttgtccgtcgcactctgaatgtgccntttgaaggtaaaaactgcgnccaaatcatggattgtggtagatatcgccaacgttccttnaagtacggccgcaa

SEQ ID NO: 107 - DNA, 673 bp, Homo sapiens
  SITE (1): n equals a,t,g, or c
  SITE (3): n equals a,t,g, or c
  SITE (20): n equals a,t,g, or c
nanattcttcccttactaantggaacaaaagctggagctccaccgcggtggcggccgctctagaactagtggatcccccggtctgcaggaattcggcacgagccacgattcagtcccctggactgtagataaagaccctttcttgccaggtgctgagacaaccacactatgagaggcactccaggagacgctgatggtggaggaagggccgtctatcaatcaatgtgtaaacctattactgggactattaatgatttgaatcagcaagtgtggacccttcagggtcagaaccttgtggcagttccacgaagtgacagtgtgaccccagtcactgttgctgttatcacatgcaagtatccagaggctcttgagcaaggcagaggggatcccatttatttgggaatccagaatccagaaatgtgtttgtattgtgagaaggttggagaacagcccacattgcagctaaaagagcagaagatcatggatctgtatggccaacccgagcccgtgaaacccttccttttctaccgtgccaagactggtaggacctccacccttgagtctgtggccttcccggactggttcattgcctcctccaagagagaccagcccatcattctgacttcagaacttkggaagtcatacaacactgcctttgaattaaatattaatg

SEQ ID NO: 108 - DNA, 1869 bp, Homo sapiens
ttttttttttgatctccttccatctttatttttatggactagtcagaacacagtgaaccagccagtgaggagtggaaggggttaatccgaacaatccaagggccaatgtgggaaatgtgaagttcaaggtcacacagtcattctgctgtcargaagagtgtcatragtcarggaaggaragaagtattttaatagtgccctgtgggattctttctctctctctctctttttaatgtactatgaatcacaacacagtcaytgagctatagcagacaggctctggaatttgcattgatgtgtgatctctggcagccgctacatattcaatggacaaagtccgatgcttcctacacagagaattctgctgggtcagctcgtggagtgtcagcaggaaaggccacccagggatgcctgtcttggttctcagtttctcatcagtgtgtactttcttcttggtgagaggaaacacacctggtccctgggcctctgcatatagcatcaggcagggtctgagggcccctgggattctcagaatagaaggctctgtcccttggacaaggccagctggtgttacttggctccacaagtgttgatgtttttcccatccacggcatcttccacgagggaaatgtggtaatcggtggacagggtgaagtgagagatacagcccacgagccctctcatatattgcctgttagtgtgcagagcaatttccttcattccacccacatacagagctccattgatgttaagctgccgcatcatgcctggggatttgcctgttctggctccatagtcatccacggttatctttcctgactggccatccctaacggccttaactcggtgccaccgaccatcgttgaaggagccattcaccatgatggatgccacaccactgcccaggttatagctgaacacgagggctccatcccgaaggcccaaggaaatgaagtcgctgttgggtctcatggggctgtctcccctccacagcaaaaggccatccttggcagttgttttaaacctcatgaacacatttgatcttgatcctgacaccctcttcaagatatctgggttgtcatacgtcaggtaactgcggccgataaactgcgggatctcaatggcttctatgatcgctttctggcagtgaagcccctcaaagcccaaggggcagtcacagtcatagccctccttcctgggccggcagctgcccccatgggcacaaggggctctcacacaggggtgggccgcattctccacattcacttccggargtgaagtcatgcttcacatggatggttcggtcattcaggatgatcttctggatgctcccgctgaaaggcttcaggacacccgagttcttcttcacatcatcataattggggactccgccaatgaaaatgtctgtgttgcacttaatctgtgtgaagcctccctctgccattccctccactatcttctgcttatccacctgtaagattccattctttgctgtgcgagatacacgaagctcgtgccagttgcccagggtgaggggatcttcactcctgaggacaccggtcccagagccacagtcaaagcggaactccacgtggccccctgccaagttgatggacaggaagtctttgctgcctgtgtcatagctgtacaggaggacaccatctcctgagtctggccgaaatgtgatctcaaattccatgaaggaaaggtaatgctggggctccagtggccagggagttgcagcgtaagatctcagagactctctgaactgaggaatggtcaaggtgaaagcatcttcacagtgtcgacctttaaacccaaggggacagaggcaaatgtaggagtcggctttgattgctgtgcaggtgc

SEQ ID NO: 109 - DNA, 728 bp, Homo sapiens
  SITE (663): n equals a,t,g, or c
aagctaccaagatcaacctctccctttccgctttgggtaatgtcatctctgctctagtggacggcaaaagcactcacattccatatcgggactcaaagcttaccaggctcctccaagattcccttggtggcaatgccaagactgtgatggtggccaacgtggggcctgcctcttacaacgtagaagagactctgaccactctgcgatatgccaaccgtgccaaaaacattaagaacaaaccaagggtcaatgaggaccccaaggatgccctycttcgagaattccaggaagagattgctcggctcaaggcccagctggaaaaacggtccattggtaggaggaagaggcgagagaagcggagggaaggtggtggcagtggtgggggtggggaagaggaggaggaggagggagaagagggtgaggaggaaggggatgataaggatgattactggcgggaacagcaagaaaaactggagattgagaagcgggccattgtagaggatcacagcttggttgcagaggagaagatgaggctgctgaaggagaaagagaaaaagatggaggacctgcggcgggagaaggatgctgccgagatgctgggcgccaagatcaaggtaccatacccgtacccttccttaggcccttgccctgtcactgcttttnctttcatcaaacaacaacaaaaaacataaccatatgagggatgatgtctctcatcagttttggat

SEQ ID NO: 110 - DNA, 616 bp, Homo sapiens
  SITE (1): n equals a,t,g, or c
  SITE (2): n equals a,t,g, or c
  SITE (3): n equals a,t,g, or c
  SITE (7): n equals a,t,g, or c
  SITE (9): n equals a,t,g, or c
nnnaaananatccagcacaagaaaaggacccggagtgattgtggatcctaccactggattgatccctttgaccagtgtacccacatcaccaaaagaaatgaccacaaagcttggcgttacagcagagtacaagcccagcttcacgttccctcggaacatctccttctccccaaaccacagttgtttccacggctgaagacttggctcccaaatctgccacctttgctgttcagagcagcacacagtcaccaacaacactgtcctcttcagcctcagtcaacagctgtgctgtgaacccttgtcttcacaatggcgaatgcgtcgcagacaacaccagccgtggctaccactgcaggtgcccgccttcctggcaaggggatgattgcagtgtggatgtgaatgagtgcctgtcgaacccctgcccatccacagccacgtgcaacaatactcagggatscwttatctgcaaatgcccggttgggtaccagttggaaaaarggatatgcaatttgggtaaragacttartctatttcggactttattccgtaccacaatatattttacaargtaacatttgttattttcttcctaaccaaaatcagtatttgtccaagg

SEQ ID NO: 111 - DNA, 837 bp, Homo sapiens
  SITE (506): n equals a,t,g, or c
  SITE (745): n equals a,t,g, or c
  SITE (837): n equals a,t,g, or c
tggggatcattcccatatagaagaagcagccatggatggtacactgagaaggattttagtacaaaagaacttacagagacccacaggtttggctgtggattattttagtgaacgcatatattgggctgactttgagctctccatcattggcagtgttctgtatgatggctctaattcagtagtctctgtcagcagcaaacaaggtttattacatccacataggatcgatatctttgaagattatatatatggagcaggacctaaaaatggtgtatttcgagttcaaaaatttggccatggttcaagtagagtacttagctttaaatattgataaaacaaaaggtgttttgatatctcatcgttataaacaactaagatttacccaatccatgcttggatttagcatgccgaatttctttgcttgctaaatccttctggggccacttgtgtgtgtccagaaggaaaatatttgattaatggcacctgcaatgatgacagcctgttanatgattcatgkaagttaacttgtgaaaatggaggaagatgcattttaaatgagaaaggtgatttgargtgtcactgktggcccarttattcaggagaaagatgtgaagtcaaccactgtagcaactactgscagaatggaggaacttgcgtaccatcagttctagggagacccacctgcagctgtgcactgggtttcactgggccaaactgtggtaaagacagtctgtgaaggattttntgtcaaaatggaaggaactgcattgtgactgctggaaaccagccttactgccactgccagcggaatacccggaaacagatgtcagtactacn

SEQ ID NO: 112 - DNA, 1868 bp, Homo sapiens
ttcggcacgagcggcacgaggcggttctggcttcatcatgtcagaggccggcctgatcatcaccaatgcccacgtggtgtccagcaacagtgctgmcccgggcagscagcagctcaaggtgcagstacagaatggggactcctatgaggccaccatcaaagacatcgacaagaagtcggacattgccaccatcaagatccatcccaagaaaaagctccctgtgttgttgctgggtcactcggccgacctgcggcctggggagtttgtggtggccatcggcagtcccttcgccctacagaacacagtgacaasgggcatcgtcagcactgcccagcgggagggcagggagctgggcctccgggactccgacatggactacatccagacggatgccatcatcaactacgggaactccgggggaccactggtgaacctggatggcgaggtcattggcatcaacacgctcaaggtcacggctggcatctcctttgccatcccctcagaccgcatcacacggttcctcacagagttccaagacaagcagatcaaagactggaagaagcgcttcatcggcatacggatgcggacgatcacaccaagcctggtggatgagctgaaggccagcaacccggacttcccagaggtcagcagtggaatttatgtgcaagaggttgcgccgaattcaccttctcagagaggcggcatccaagatggtgacatcatcgtcaaggtcaacgggcgtcctctagtggactcgagtgagctgcaggaggccgtgctgaccgagtctcctctcctactggaggtgcggcgggggaacgacgacctcctcttcagcatcgcacctgaggtggtcatgtgaggggcgcattcctccagcgccaagcgtcagagcctgcagacaacggagggcagcgcccccccgagatcaggacgaaggaccaccgtcggtcctcagcagggcggcagcctcctcctggctgtccggggcagagcggaggctgggcttggccaggggcccgaatttccgcctggggagtgttggatccacatcccggtgccggggagggaagcccaacatccccttgtacagatgatcctgaaagtcacttccaagttctccggatattcacaaaactgccttccatggaggtcccctcctctcctagcttcccgcctctgcccctgtgaacacccatctgcagtatcccctgctcctgcccctcctactgcaggtctgggctgccaagcttcttcccccctgacaaacgcccacctgacctgaggccccagcttccctctgccctaggacttaccaagctgtagggccagggctgctgcctgccagcctggggtccctggaggacaggtcacatctgatccctttggggtgcgggggtggggtccagcccagagcaggcactgagtgaatgccccctggctgcggagctgagccccgccctgccatgaggttttcctccccaggcaggcaggaggccgcggggagcacgtggaaagttggctgctgcctggggaagcttctcctccccaaggcggccatggggcagcctgcagaggacagtggacgtggagctgcggggtgtgaggactgagccggcttccccttcccacgcagctctgggatgcagcagccgctcgcatggaagtgccgcccagaggcatgcaggctgctgggcaccaccccctcatccagggaacgagtgtgtctcaaggggcatttgtgagctttgctgtaaatggattcccagtgttgcttgtactgtatgtttctctactgtatggaaaataaagtttacaagcacaaaaaaaaaaaaaaaaaaaaaaaaaaaaaaaaaaaaaaaaaaaaa

SEQ ID NO: 113 - DNA, 1699 bp, Homo sapiens
  SITE (6): n equals a,t,g, or c
  SITE (19): n equals a,t,g, or c
  SITE (32): n equals a,t,g, or c
  SITE (38): n equals a,t,g, or c
  SITE (39): n equals a,t,g, or c
  SITE (1679): n equals a,t,g, or c
  SITE (1683): n equals a,t,g, or c
  SITE (1687): n equals a,t,g, or c
  SITE (1688): n equals a,t,g, or c
  SITE (1694): n equals a,t,g, or c
cttagngggcgcaccaacnggaatactctgtngcatgnncgcgtacgtaagcttggatcctctagagcggccgccctttttttttttttttttttttaaattttataaatcttttattttttccaaagaacaaaagaagcactataaaccattgagatacatttaaaaagtacaattttaacatagtacttgtgatgcatatgtaattctttgtaacaaaatggtcaaacacttaaaaagatacagtatatatgtctgcacattttagcaaggctgtgcattttttataaactacatgagtttatattcaaagaccttgaatatgctttcagaactttcaaagtatagatcattgttaagattgcctttactcttaaaaacctaaagggatgtatttctataaaaactagaaataaggaatttacctagttcctagattatttattagtcaaaaatacatgcttagtggctagaaatacaatactcctgataaaatagctaataaataccatataaaatcaaaggtttaatgagtaagtcatgacattatgccatactaggaagmcatcaaatgtytaaatttacagaaaaagaatatattagtccttatagaactcatatatttagaaattctaaataaggaaatatattctacacagataactgtataacactcatatttctaatgcagtataacttaaatatcttccaaaggtcaagagtaagaaaattctctaacatattccccaaaaaacaatactaaagttgttcctatttcataagagagtgaggataacaatttatctccatatacagcattccaatgaaattccattcactctcatacagcttttcccatggcagtataagaactacattctagaaataacagtagtcacattgaaaggattaacaatcagtgatttcttaattcacaatttagtcaactcttaaagatttcaatagcataacagttaaaataacagcaaatacggagcaggaaataatatgctaaacaggacataaactgagcagaaagctgcaagggcaagcatagattccctcttcctttctctctttcatagtagggaattcgtacagaaacctaactcattggagaaaatgagcccttgcttcttgtcttcagtgggtccagaggtccccagaaaattctgctgaagaactgggcaacttttctaacacatggtcttttctttcaattgttctttccactgtccaatattttctgaacgatctttttgatcaaaggagcttctgggtccagacagacttcccttccattcttcaaggtggctatcacttccaccttggagcactgcggtcccgcggcgatcacctgcagatcactgaccgttttgggatgaattcccggtgtggtggttaaacacacacaacgcagctctctcacaacggccgcgacaggaccggcgctggcgaggggcccgggcggcgtcagcagcagcagcgcgagcagcgcgcacagggagcccgaagggccggagacgcgggcagcgcggctggatagcagtctcatagtggcgaagagaggactgcagagggctccgaaggagggagaaggcgcgcggacgcgtgggtcgacccgggaattccggaccggtacctgcaggcgtaccagcwttccctatagtgggcgtttnggtnaagnnccccgngtaaa

SEQ ID NO: 114 - DNA, 1539 bp, Homo sapiens
ccacgcgtccgcgcgccttctccctccttcggagccctctgcagtcctctcttcgccactatgagactgctatccagccgcgctgcccgcgtctccggcccttcgggctccctgtgcgcgctgctcgcgctgctgctgctgacgccgcccgggcccctcgccagcgccggtcctgtcgcggccgttgtgagagagctgcgttgtgtgtgtttaaccaccacaccgggaattcatcccaaaacggtcagtgatctgcaggtgatcgccgcgggaccgcagtgctccaaggtggaagtgatagccaccttgaagaatggaagggaagtctgtctggacccagaagctcctttgatcaaaaagatcgttcagaaaatattggacagtggaaagaacaattgaaagaaaagaccatgtgttagaaaagttgcccagttcttcagcagaattttctggggacctctggacccactgaagacaagaagcaagggctcattttctccaatgagttaggtttctgtacgaattccctactatgaaagagagaaaggaagagggaatctatgcttgcccttgcagctttctgctcagtttatgtcctgtttagcatattatttcctgctccgtatttgctgttattttaactgttatgctattgaaatctttaagagttgactaaattgtgaattaagaaatcactgattgttaatcctttcaatgtgactactgttatttctagaatgtagttcttatactgccatgggaaaagctgtatgagagtgaatggaatttcattggaatgctgtatatggagataaattgttatcctcactctcttatgaaataggaacaactttagtattgttttttggggaatatgttagagaattttcttactcttgacctttggaagatatttaagttatactgcattagaaatatgagtgttatacagttatctgtgtagaatatatttccttatttagaatttctaaatatatgagttctataaggactaatatattctttttctgtaaatttagacatttgatgtcttcctagtatggcataatgtcatgacttactcattaaacctttgattttatatggtatttattagctattttatcaggagtattgtatttctagccactaagcatgtatttttgactaataaataatctaggaactaggtaaattccttatttctagtttttatagaaatacatccctttaggtttttaagagtaaaggcaatcttaacaatgatctatactttgaaagttctgaaagcatattcaaggtctttgaatataaactcatgtagtttataaaaaatgcacagccttgctaaaatgtgcagacatatatactgtatctttttaagtgtttgaccattttgttacaaagaattacatatgcatcacaagtactatgttaaaattgtactttttaaatgtatctcaatggtttatagtgcttcttttgttctttggaaaaaataaaagatttataaaatttaaaaaaaaaaaaaaaaaaaaa

SEQ ID NO: 115 - DNA, 447 bp, Homo sapiens
  SITE (398): n equals a,t,g, or c
  SITE (425): n equals a,t,g, or c
  SITE (447): n equals a,t,g, or c
gggcagacagaagaatgtggagtggatcgaggggatgtcgggaggacctcccagggtggcccctgcatagtgggacttgagactggacaaggagcagcccccagtggttaggactgaggagggggatgggatttttctccaaggaaacacccttctcaagtactcttgtccctgcccaggagacacccaggtcctttgaatgcacctgcccgcgtgggttctacgggctgcggtgtgaggtgagcggggtgacatgtgcagatggaccctgcttcaacggcggcttgtgtgtcgggggtgcagaccctgactctgcctacatctgccactgcccacccggtttccaaggctccaactgtgagaagagggtggaccggtgcagcctgcagccatgccgnaatggtgaaggctggagcctgaacggngagggatggggttgggggtctn

SEQ ID NO: 116 - DNA, 688 bp, Homo sapiens
acccacgcgtccgcgagccgctcagtctccctgctctccgtggtcccggctcgcgtgtagcggcggcggcggcgtctccgtgaggaggcgcgcggggccatgacgtcagcgtccacaaaggtcggagagatcttctcggcggccggcgccgccttcacgaagctcggggagctgacgatgcagctgcatcccgtggccgactcttctcctgcgggggcccagataaaggccactgtgaaacgcaaggtatatgaagattctggcatcccccttccagctgagtcacccaagaaagggcccaagaaggtggcatctggtgtcttgtcacctcctccagctgcccctcctcccagcagctccagtgtccctgaggccgggggtcccccataaagaaacagaaggctgcctgaccctggattctggccttctcatgacctctgctgatcctcctstcctctcctgctgagccttccacctctgacctctcactgttcatgccggacctgtggatctcctgggactccgagcaaggcctgcacgagagagggctgaaaggctgctggggctgccacctcgctattcccgcataagcatctgcccccaacccctttgaccttcatctgatggacatttttatacagaaaacaataaagatttccctctcaaaaaataaaaaaaaaaaagtttt

SEQ ID NO: 117 - DNA, 963 bp, Homo sapiens
  SITE (868): n equals a,t,g, or c
  SITE (944): n equals a,t,g, or c
  SITE (962): n equals a,t,g, or c
gggatggtcacgtgtctcctgccgctgcactgagggcttccggctggcagcagacgggcgcagttgcgaggacccctgtgcccaggctccgtgcgagcagcagtgtgagcccggtgggccacaaggctacagctgccactgtcgcctgggtttccggccagcggaggatgatccgcaccgctgtgtggacacagatgagtgccagattgccggtgtgtgccagcagatgtgtgtcaactacgttggtggcttcgagtgttattgtagcgagggacatgagctggargctgatggcatcagctgcagccctgcaggggccatgggtgcccaggcttcccaggacctcggagatgagttgctggatgacggggaggatgaggaagatgaagacgaggcctggaaggcyttcaacggtggctggacggagatgcctgggatcctgtggatggagcctacgcagccgcctgactttgccctggcctatagaccgagcttcccagaggacagagagccacagataccctaccactcctcagtgctctccgtcacccggcctgtggtggtctctgccacgcgtcccacactgccttctgcccaccagcctcctgtgatccttgccacacaaccagttttgtcccgtgaccaccagatccccgtgatcgcagccaaytwtccagatytgccttytgcctaccaacccggtattctctctgtctctcattcagcacagcctcctgcccaccagccccctatgatctcaaccaaatatccggagctcttccctgcccaccagtcccccatgtttccagacacccggcctgtggtggtctctgccacgcgtcccacactgccttctgccaacgtgtgnctttttggtggtcctgcttgcactgggcatcgtggactgtacccgctgtggcccccatgcacccaacaagcgcatnactgactgctatcgctgng

SEQ ID NO: 118 - DNA, 565 bp, Homo sapiens
  SITE (493): n equals a,t,g, or c
  SITE (538): n equals a,t,g, or c
  SITE (560): n equals a,t,g, or c
  SITE (564): n equals a,t,g, or c
gaacgaatgcatcccccacaatggctgtcgccacggcacctgcagcactccctggcaatgtacttgtgatgagggctggggaggcctgttttgtgaccaagatctcaactactgcacccaccactccccatgcaagaatggggcaacgtgctccaacagtgggcagcgaagctacacctgcacctgtcgcccaggctacactggtgtggactgtgagctggagctcagcgagtgtgacagcaacccctgtcgcaatggaggcagctgtaaggaccaggaggatggstacmactgcctgtgtcctccgggctactatggcctgcattgtgaacacagcaccttgagctgcgccgactccccctgcttcaatgggggctcctgccgggagcgcaaccagggggccaactatgcttgtgaatgtccccccaacttcaccggctccaactgcgagaagaaagtggacaggtgcaccagcaacccctgtgccaacggnggacagtgcctgaaccgaggtccaagccgcatgtgccgctgccgnctggattcacggcacctactgngaant

SEQ ID NO: 119 - DNA, 298 bp, Homo sapiens
tctggacgtttcatcacatattcccaggaaagcccagccaaatgcagctggcactgtgccaakcattgggctagrtgctgggaattgaaataataaactatttcctgatttctcttctctcttctggagaaagaattggattagaacaagcattgcagtgtcgagatggctatgaaccctgtgtaaatgaaggaatgtgtgttacctaccacaatggcacaggwtactgcaaatgtccagaaggcttcttgggggaatattgtcaacatcgagacccctgtgagaagaaccgctgcca

SEQ ID NO: 120 - DNA, 561 bp, Homo sapiens
gagaaaggtgaactccttttctcaagcacttctgctctcctctaccagaatcactcagaatgcttcccgggtgtatattcttgatgattttactcattcctcaggttaaagaaaagttcatccttggagtagagggtcaacaactggttcgtcctaaaaagcttcctctgatacagaagcgagatactggacacacccatgatgatgacatactgaaaacgtatgaagaagaattgttgtatgaaataaaactaaatagaaaaaccttagtccttcatcttctaagatccagggagttcctaggctcaaattacagtgaaacattctactccatgaaaggagaagcgttcaccaggcatcctcagatcatggatcattgtttttaccaaggatccatagtacacgaatatgattcagctgccagtatcagtacgtgtaatggtctaaggggattcttcagaataaacgmccaaagatacctcattgaaccagtgaaatactcagatgagggagaacatttggtgttcaaatataacctgagggtgccgtatggtgccaatt

SEQ ID NO: 121 - DNA, 883 bp, Homo sapiens
  SITE (836): n equals a,t,g, or c
  SITE (838): n equals a,t,g, or c
  SITE (867): n equals a,t,g, or c
gcggccgcgggacggggtagtgagcgygtcacttcctgccgctgccaggcgcgtcctcccgcgcgctatgacggccagcgcacagccgcgcgggcggcggccaggagtcggagtcggagtcgtggtgaccagctgcaagcatccgcgttgcgtcctcctggggaagaggaaaggctcggttggagctggcagtttccaactccctggaggtcatctggagttcggtgaaacctgggaagaatgtgctcaaagggaaacctgggaagaagcagctcttcacctgaaaaatgttcactttgcctcagttgtgaattctttcattgagaaggagaattaccattatgttactatattaatgaaaggagaagtggatgtgactcatgattcagaaccaaagaatgtagagcctgaaaaaaatgaaagttgggagtgggttccttgggaagaactacctcccctggaccagcttttctggggactgcgttgtttaaaagaacaaggctatgatccatttaaagaagatctgaaccatctggtgggatacaaaggaaatcatctctaggtggccragaagatttgattttctttaaaaagacaagaataaggtctggttagggaatgaaaaatgtatacatttcggaacaactccattttatctaaaaaagttcttgtgattgccagtttatttgcagtctcttaatgtatcccccactctttcagccagtacttgagaaaatttttctgaaatatgtcattgaattgtattccagacacagaatacatgataaatactggatattrtgggtaatctgctttccatatttacctatggatantntactgtggcagtttggtccattactagcntggcagggagttaggg

SEQ ID NO: 122 - DNA, 680 bp, Homo sapiens
gctgtgttgatggtgtggctggctatcgttgcacatgtgtgaaaggatttgtaggcctgcattgtgaaacagaagtcaatgaatgccagtcaaacccatgcttaaataatgcagtctgtgaagaccaggttgggggattcatgtgcaaatgcccacctggatttttgggtacccgatgtggaaagaacgtcgatgagtgtctcagtcagccatgcaaaaatggagctacctgtaaagacggtgccaatagcttcagatgcctgtgtgcagctggcttcacaggatcacactgtgaattgaacatcaatgaatgtcagtctaatccatgtagaaatcaggccacctgtgtggatgaattaaattcatacagttgtaaatgtcagccaggattttcaggcmaaaggtgtgaaacagaacagtctacaggctttaacctggattttgaagtttctggcatctatggatatgtcatgctagatggcatgctcccatctctccatgctctaacctgtaccttctggatgaaatcctctgacgacatgaactatggaacaccaatctcctatgcagttgataacggcagcgacaataccttgctcctgactgattataacggctgggttctttatgtgaatggcagggaaaagataacaaactgtccctcggtgaatgatggcaga

SEQ ID NO: 123 - DNA, 852 bp, Homo sapiens
  SITE (37): n equals a,t,g, or c
  SITE (851): n equals a,t,g, or c
ggcgattaagttgggtaacgcagggttttcccagtcngacgttgtaaaacgcggcccagtgaattgtaatccgactcactatagggcgaattgggtacygggccccccctcgagttttttttttttttttttcatggaaaacagtaatgtttaattgagcacctcatctccaccctgactctcagggctgtgacagctgcacccacagcaacctgggcacggaggcaaggggggcccacaagtgagggagggcacacagagtcagagggcagcaaggaggctgaggggcagtgggagtgccaggagcagggtcctggatggggctggcagggccagggcctgcccgttgaggcagtcccagatccagtgttggtaggaggagacctgtaggtagatgggtggggcctcgctcttctggcagcctgcaccccagctcaccaatcccaccaggtaccacgtgccctccatggagcagaccaagggctctccagttagctcatagcagaacttctccctgtgggtgtcctccgcacacatcatctgggacttgatgatctgaaccagagtggggattttggtgaagttgtggtagaaattgtcacactctttgttgttcaggatgatgacttccttctcctgaatggtccggaactgaggccacatgccgtcagccttggaaagtccccagcccgtcacagtgcagcgggaatggtccttcaacacatagtccgtgccagctcgtgccgaattcctgcagcccgggggatccactagttctagagcggccgccaccgcggtggagctccagcttttgttccctttagtagggttaatttcragckggcgaactnt

SEQ ID NO: 124 - DNA, 743 bp, Homo sapiens
  SITE (238): n equals a,t,g, or c
ggcaggacttgacatgctgcccgactgcctgtcggccgagggcgagctgcgctgccgccggctgctggcaggggccacggcccggctccgcgcgcggcccgcgtyggccgcggtgctcgtgccgctctgctcagtgcgtggggtcccggcgctgctgtacacgctgcggtccagccgcctgaccgggaggcacaagggcracgtcaktttcccaggcggcaagtgcgacccggctganccaagatgtggtgcacacggccctgcgggaaacccgggaggarctgggcctggcartgcccgargarcacgtgtggggcctgctgcggcctgtgtatgatccgcaaaaggccaccgtggtgccagtgcttgctggtgtaggcccactggatccccagagcctcaggcccaactcggaggaggtagatgargtgtttgcactgccgctggcccacctgctgcagacgcagaatcagggctatacccacttctgccggggtggccacttccgctacacactacccgtcttcctgcatggaccacaccgggtctggggcctcacagctgtcatcactgagtttgccctgcagctgctggcacctggtacctaccagccccgcctggccggcctgacctgctcaggggctgagggtytggcccgccctaagcagcccctggcttcaccctgtcaggccagctccactccaggactgaataaaggtctttgacagctctaaaaaaaaaaa

SEQ ID NO: 125 - DNA, 850 bp, Homo sapiens
  SITE (20): n equals a,t,g, or c
  SITE (23): n equals a,t,g, or c
  SITE (844): n equals a,t,g, or c
  SITE (846): n equals a,t,g, or c
actaccggtcacagtggtgnctnggacacacgtgtccctctcccaaggatctggcagccaaaggcgctttcatgaaaatatttattacccaataaaaatattcacccagtgcttcagcttacggtaaactaaacacatctattatttacaacatagaaaattaaaggcgatgcccaagtcccggccttccgcaggggcgccgctcccgctggaggacggaagggaccagggaccgagggtgcgcgggcgcatccgggcgcaggaggcggtgcaggagtgcgcagggcagcaagagtagcaggctgggcgcgcccccggcgctcggcccgtgagcgtgggaggccaggaagtctttcgggtcacagcggtcaggcgtctggagggggaggcagtgcagggccccgaagatgcacctgcagaggtggcaggcgcggagggtccaggctccgtgctccagggcgccgcattcactgcgcctctggtcatgctcgcagtagcggccggtgaagtgggccgggcacacgcagaagctgcccagcacgcaggtaccgccgttcctgcagcagcgcggccgcgcggacgcaccctctccgaaagcccgggagtaggggagcggctcctccggcccccagccctcggcgctcccagtcacctctccgaaatgactggaggtccagttaagcggtgactgtcggtgcttctgagtggcaaccttggtgacttcccctctaccgccgttatgtttctctctttgatagctgtttcccaaattgatgatctgtaatgccaaactgaccgtaaacagaagcctgacatggtgcctccaggtcatttttggtttganantctc

SEQ ID NO: 126 - DNA, 618 bp, Homo sapiens
  SITE (614): n equals a,t,g, or c
  SITE (615): n equals a,t,g, or c
  SITE (616): n equals a,t,g, or c
tcgcccgctcgaaattaaccctactaaagggaacaaaagctggagctccaccgcggtggcggccgctctagaactagtggatcccccgggctgcaggaattcggcacgagacggaggcccggaccgtgctcaggtgctgccgagggtggacgcagcagcccgacgaggagggctcctctcggctgaatgcagcgccggcctctgttttcacggtggccgttgtgtgccaggctcagcccagccgtgtcactgtccccccggcttccagggaccccgctgtcagtatgatgtggacgaatgccgaacccacaacggtggctgccagcaccggtgcgtgaacaccccaggctcctacctctgtgagtgcaagcccggcttccggctccacactgacagcaggacctgcctggccattaactcctgcgccctgggcaatggcggctgccagcaccactgtgtccagctcacaatcactcggcatcgctgccagtgccggcccgggttccagctccaggaggacggcaggcattgtgtccgtgagtgctgcagcctgggagggaggacctgggggtggaggcaggacaagctgcctcgcctggcctgttgagcggaannngc

SEQ ID NO: 127 - DNA, 392 bp, Homo sapiens
  SITE (16): n equals a,t,g, or c
  SITE (177): n equals a,t,g, or c
  SITE (209): n equals a,t,g, or c
aaataggagccgcagncattgggctcttggggcttgtagccaggtctgggcattggtgcctttccatatcggcacctgtactgacagactccattcttccctcccagcagctccagaaaagaatcgaagtagctattgacggattcaaagcttccccggaggtgccgaaggccccantctgaataggactcctccgtgtcagggctcgngtcgctctgagccaggccacccccaaggctgagccacaaaaccaagaagccactggccagcttcatcctgcagccaggtaggtactggcttctctcctcaaaccccagccagtgtcccagaattccagggacaaaccccctacccagatgtcaggcaggactgggaaagggattatctggaac

SEQ ID NO: 128 - DNA, 2596 bp, Homo sapiens
  SITE (1): n equals a,t,g, or c
  SITE (2508): n equals a,t,g, or c
  SITE (2529): n equals a,t,g, or c
  SITE (2556): n equals a,t,g, or c
ngctcgaaattaaccctcctaaagggaacaaaagctggagctccaccgcggtggcggccgctctagaactagtggatcccccgggctgcaggaattcggcacgagggagcatggagcgcttggcagccttggggaacatgcagcgaaagttgtgggaaaggtactcagacaagagcaagactttgtaataacccaccaccagcgtttggtgggtcctactgtgatggagcagaaacacagatgcaagtttgcaatgaaagaaattgtccaattcatggcaagtgggcgacttgggccagttggagtgcctgttctgtgtcatgtggaggaggtgccagacagagaacaaggggctgctccgaccctgtgccccagtatggaggaaggaaatgcgaagggagtgatgtccagagtgatttttgcaacagtgacccttgcccaacccatggtaactggagtccttggagtggctggggaacatgcagccggacgtgtaacggagggcagatgcggcggtaccgcacatgtgataaccctcctccctccaatgggggaagagcttgtgggggaccagactcccagatccagaggtgcaacactgacatgtgtcctgtggatggaagttggggaagctggcatagttggagccagtgctctgcctyctgtggaggargtgaaaagactcggaagcggctgtgcgaccatcctgtgccagttaaaggtggccgtccctgtcccggagacactactcaggtgaccaggtgcaatgtacaagcatgtccaggtgggccccagcgagccagaggaagtgttattggaaatattaatgatgttgaatttggaattgctttccttaatgccacaataactgatagccctaactctgatactagaataatacgtgccaaaattaccaatgtacctcgtagtcttggttcagcaatgagaaagatagtttctattctaaatcccatttattggacaacagcaaaggaaataggagaagcagtcaatggctttaccctcaccaatgcagtcttcaaaagagaaactcaagtggaatttgcaactggagaaatcttgcagatgagtcatattgcccggggcttggattccgatggttctttgctgctagatatcgttgtgagtggctatgtcctacagcttcagtcacctgctgaagtcactgtaaaggattacacagaggactacattcaaacaggtcctgggcagctgtacgcctactcaacccggctgttcaccattgatggcatcagcatcccatacacatggaaccacaccgttttctatgatcaggcacagggaagaatgcctttcttggttgaaacacttcatgcatcctctgtggaatctgactataaccagatagaagagacactgggttttaaaattcatgcttcaatatccaaaggagatcgcagtaatcagtgcccctccgggtttaccttagactcagttggacctttttgtgctgatgaggatgaatgtgcagcagggaatccctgctcccatagctgccacaatgccatggggacttactactgctcctgccctaaaggcctcaccatagctgcagatggaagaacttgtcaagatattgatgagtgtgctttgggtaggcatacctgccacgctggtcaggactgtgacaatacgattggatcttatcgctgtgtggtccgttgtggaagtggctttcgaagaacctctgatgggctgagttgtcaagatattaatgaatgtcaagaatccagcccctgtcaccagcgctgtttcaatgccataggaagtttccattgtggatgtgaacctgggtatcagctcaaaggcagaaaatgcatggatgtgaacgagtgtagacaaaatgtatgcagaccagatcagcactgtaagaacacccgtggtggctataagtgcattgatctttgtccaaatggaatgaccaaggcagaaaatggaacctgtattgatattgatgaatgtaaagatgggacccatcagtgcagatataaccagatatgtgagaatacaagaggcagctatcgttgtgtatgcccaagaggttatcggtctcaaggagttggaagaccctgcatggacattaatgaatgkgaacaagtgcctaaaccttgtgcacatcagtgctccaacacccccggcagcttcaagtgtatctgtccaccaggacaacatttattaggggacgggaaatcttgcgctggattggagaggctgccaaattatggcactcaatacagtagctataaccttgcacggttctcccctgtgagaaacaactatcaacctcaacagcattacagacagtactcacatctctacagctcctactcagagtatagaaacagcagaacatctctctccaggactagaaggactattaggaaaacttgccctgaagctctgaggcaagccatgaccatgtgtagatattgatgaatgtgaaaatacagatgcctgccacatgantgtaagaatacctttggaagntatcagtgcatctgccacctggctatnaacttacaccccatggaaagacatgcccagatatcgataa

SEQ ID NO: 129 - DNA, 164 bp, Homo sapiens
cttgaccaaagaccggactgagaaaaccaccaaggctatcgaggtgagctcaccactcccagatgtactgaatgccacagagcccctgagcacagcccagagggagatccagcgccagtccacactgcagctgctgcgcaaagtcctgcagattcctgagaatg

SEQ ID NO: 130 - DNA, 255 bp, Homo sapiens
agttccctgggaaccgcaagatggggggccgcccagcgtccttggcccccaggtcggcccagctcaactccaagcgctacctgatcctcatctactccgtggagtttgacaggattcactasccgctgcccctcccgtaccagggcaagccagaccccgtggttctgcagggcatcatccggtcactgaaggaggaactgggccgcctgcaaggctggatggccagaaacactcggggacacccggggagaatga

SEQ ID NO: 131 - DNA, 1201 bp, Homo sapiens
  SITE (1118): n equals a,t,g, or c
  SITE (1138): n equals a,t,g, or c
  SITE (1150): n equals a,t,g, or c
  SITE (1174): n equals a,t,g, or c
ggctcctccaagattcccttggtggcaatgccaagactgtgatggtggccaacgtggggcctgcctcttacaacgtagaagagactctgaccactctgcgatatgccaaccgtgccaaaaacattaagaacaaaccaagggtcaatgaggaccccaaggatgccctccttcgagaattccaggaagagggtgaggaggaaggggatgataaggatgattactggcgggaacagcaagaaaaactggagattgagaascgggccattgtagaggatcacagcttggttgcagaggagaagatgaggctgctgaaggagaaagagaaaaagatggaggacctgcggcgggagaaggatgctgccgagatgctgggcgccaagatcaaggccatggagagtaagttgcttgttggaggaaaaaatatagtagatcatacgaatgaacagcagaaaatcctggagcagaaacgacaggaaattgcagagcagaaacgtcgagaaagagaaatccagcaacagatggaaagtcgagatgaggagaccttggaacttaaagagacatacagctcattgcagcaagaggtggacatcaagaccaaaaaactcaaaaagctcttctccaagcttcaggcagtgaaggctgagatccatgacctccaagaagaacacatcaaggagcgccaagagctagagcagactcagaatgagctcaccagggagctgaaactcaagcatcttattatagaaaactttatccctctggaagaaaaaagtaaaattatgaatagagccttctttgatgaagaggaagatcattggaaactacatcctataaccagactggagaaccagcagatgatgaagcggccagtctcagccgtgggatataagagaccattgagccagcacgcaagaatgtccatgatgattcgtccagaggcccgatatagggcagaaaacattgtgctgttagagctggacatgcccagccggaccaccagagactatgagggtccagccattgcccccaaggtccaggctgcattggatgcggctctgcaggatgaagatgagatacaggtggatgcatcatcatttgaaagcactgcaaataagaantccaaggccaggcttaaaantggaaggaagangaggaggaggagggagagagggtnaaggaggaaggggtgttaaggtgatta

SEQ ID NO: 132 - DNA, 1493 bp, Homo sapiens
  SITE (1384): n equals a,t,g, or c
  SITE (1484): n equals a,t,g, or c
  SITE (1485): n equals a,t,g, or c
  SITE (1490): n equals a,t,g, or c
  SITE (1493): n equals a,t,g, or c
ggcacgaggtgttccagtagaatgtccccaacctgagaaaatccccaatggaatcattgatgtgcaaggccttgcctatctcagcacagctctctatacctgcaagccaggctttgaattggtgggaaatactaccaccctttgtggagaaaatggtcactggcttggaggaaaaccaacatgtaaagccattgagtgcctgaaacccaaggagattttgaatggcaaattctcttacacggacctacactatggacagaccgttacctactcttgcaaccgaggctttcggctcgaaggtcccagtgccttgacctgtttagagacaggtgattgggatgtagatgccccatcttgcaatgccatccactgtgattccccacaacccattgaaaatggttttgtagaaggtgcagattacagctatggtgccataatcatctacagttgcttccctgggtttcaggtggctggtcatgccatgcagacctgtgaagagtcaggatggtcaagttccatcccaacatgtatgccaatagactgtggcctccctcctcatatagattttggagactgtactaaactcaaagatgaccagggatattttgagcaagaagacgacatgatggaagttccatatgtgactcctcaccctccttatcatttgggagcagtggctaaaacctgggaaaatacaaaggagtctcctgctacacattcatcaaactttctgtatggtaccatggtttcatacacctgtaatccaggatatgaacttctggggaaccctgtgctgatctgccaggaagatggaacttggaatggcagtgcaccatcctgcatttcaattgaatgtgacttgcctactgctcctgaaaatggctttttgcgttttacagagactagcatgggaagtgctgtgcagtatagctgtaaacctggacacattctagcaggctctgacttaaggctttgtctagagaatagaaagtggagtggtgcctccccacgctgtgaagccatttcatgcaaaaagccaaatccagtcatgaatggatccatcaaaggaagcaactacacatacctgagcacgttgtactatgagtgtgaccccggatatgtgctgaatggcactgagaggagaacatgccaggatgacaaaaactgggatgaggatgagcccatttgcattcctgtggactgcagttcacccccagtctcagccaatggccaggtgagaggagacgagtacacattccaaaaagagattgaatacacttgcaatgaagggttcttgcttgagggagccaggagtcgggtttgtcttgccaatggaagttggagtggagccactcccgactgtgtgcctgtcagatgtgccacnccgccacaactggccaatggggtgacggaaggcctggactatggcttcatgaaggaagtaacattccactgtcacgagggctacatcttgcacggtgctnnaaagnacn

SEQ ID NO: 133 - DNA, 413 bp, Homo sapiens
  SITE (276): n equals a,t,g, or c
  SITE (313): n equals a,t,g, or c
  SITE (398): n equals a,t,g, or c
  SITE (405): n equals a,t,g, or c
ggcacgagccacgggggcagccgggcgcgacggtcggctgcgtgtgggtttgcggctgttggaggtgaaccagcagagcctgctgggctgacgcacggcgaggcggtgcagctgctccgmatgtgggcgacaccctcaccgtgctggtctgtgacggcttcgaggccagcaccgacgcagccctggaggtgtccccaggtgtcattgccaacccctttgcggcaggcatcggccaccggaacagcctggagagcatctcttccatcgaccgggagntgagccctgagggcccaggcaaggagaaggagttgcntggacagaccctgcattgggggcccgaggccacagaagccgtagttcggggtttgcaagcccttgaagttggattaaccgggccntggccgncttgccca

SEQ ID NO: 134 - DNA, 1352 bp, Homo sapiens
ccacgcgtccgcccgccccaccagccatggtggtttctggagcgcccccagccctgggtgggggctgtctcggcaccttcacctccctgctgctgctggcgtcgacagccatcctcaatgcggccaggatacctgttcccccagcctgtgggaagccccagcagctgaaccgggttgtgggcggcgaggacagcactgacagcgagtggccctggatcgtgagcatccagaagaatgggacccaccactgcgcaggttctctgctcaccagccgctgggtgatcactgctgcccactgtttcaaggacaacctgaacaaaccatacctgttctctgtgctgctgggggcctggcagctggggaaccctggctctcggtcccagaaggtgggtgttgcctgggtggagccccaccctgtgtattcctggaaggaaggtgcctgtgcagacattgccctggtgcgtctcgagcgctccatacagttctcagagcgggtcctgcccatctgcctacctgatgcctctatccacctccctccaaacacccactgctggatctcaggctgggggagcatccaagatggagttcccttgccccaccctcagaccctgcagaagctgaaggttcctatcatcgactcggaagtctgcagccatctgtactggcggggagcaggacagggacccatcactgaggacatgctgtgtgccggctacttggagggggagcgggatgcttgtctgggcgactccgggggccccctcatgtgccaggtggacggcgcctggctgctggccggcatcatcagctggggcgagggctgtgccgagcgcaacaggcccggggtctacatcagcctctctgcgcaccgctcctgggtggagaagatcgtgcaaggggtgcagctccgcgggcgcgctcaggggggtggggccctcagggcaccgagccagggctctggggccgccgcgcgctcctagggcgcagcgggatgcggggctcggatctgaaaggcggccagatccagatctggatctggatctgcggcggcctcgggcggtttcccccgccgtaaataggctcatctacctctgggggcccggacggctgctgcggaaaggaaaccccctccccgacccgcccgacggcctcaggccccgcctccaaggcatcaggccccgcccaacggcctcatgtccccgcccccacgacttccggccccgcccccgggccccagcgcttttgtgtatataaatgttaatgatttttataggtatttgtaaccctgcccacatatcttatttattcctccaatttcaataaattatttattctccaaaaaaaaaaaaaaa

SEQ ID NO: 135 - DNA, 1352 bp, Homo sapiens
gcccgccccaccagccatggtggtttctggagcgcccccagccctgggtgggggctgtctcggcaccttcacctccctgctgctgctggcgtckacagccatcctcaatgcggccaggatacctgttcccccagcctgtgggaagccccagcagctgaaccgggttgtgggcggcgaggacagcactgacagcgagtggccctggatcgtgagcatccakaagaatgggacccaccactgcgcaggttctctgctcaccagccgctgggtgatcactgctgcccactgtttcaaggacaacctgaacaaaccatacctgttctctgtgctgctgggggcctggcagctggggaaccctggctctcggtcccagaaggtgggtgttgcctgggtggagccccaccctgtgtattcctggaaggaaggtgcctgtgcagacattgccctggtgcgtctcgagcgctccatacagttctcagagcgggtcctgcccatctgcctacctgatgcctctatccacctccctccaaacacccactgctggatctcaggctgggggagcatccaagatggagttcccttgccccaccctcagaccctgcagaagctgaaggttcctatcatcgactcggaagtctgcagccatctgtactggcggggagcaggacagggacccatcactgaggacatgctgtgtgccggctacttggagggggagcgggatgcttgtctgggcgactccgggggccccctcatgtgccaggtggacggcgcctggctgctggccggcatcatcagctggggcgagggctgtgccgagcgcaacaggcccggggtctacatcagcctctctgcgcaccgctcctgggtggagaagatcgtgcaaggggtgcagctccgcgggcgcgctcaggggggtggggccctcagggcaccgagccagggctctggggccgccgcgcgctcctagggcgcagcgggatgcggggctcggatctgaaaggcggccagatccagatctggatctggatctgcggcggcctcgggcggtttcccccgccgtaaataggctcatctacctctgggggcccggacggctgctgcggaaaggaaaccccctccccgacccgcccgacggcctcaggccccgcctccaaggcatcaggccccgcccaacggcctcatgtccccgcccccacgacttccggccccgcccccgggccccascgcttttgtgtatataaatgttaatgatttttataggtatttgtaaccctgcccacatatcttatttattcctccaatttcaataaattatttattctccaaaaaaaaaaaaaaagggcggccgc

SEQ ID NO: 136 - DNA, 915 bp, Homo sapiens
  SITE (776): n equals a,t,g, or c
ggaaattggaattttgatatctttctatttgatagactaacaaatggaaatagtctagtaagcttaacctttcatttatttagtcttcatggattaattgagtacttccatttagatgatgaaacttcgtagatttttagttatgattcaagaagattaccacagtcaaaatccttaccataacgcatccacgctgcggatgttactcaggccatgcactgttacttaaaggaacctaagcttgccaattctgtaactccttgggatatcttgctgagcttaattgcagctgccactcatgatctggatcatccaggtgttaatcaacctttccttattaaaactaaccattacttggcaactttatacaagaatacctcagtactggaaaatcaccactggagatctgcagtgggcttattgagagaatcaggcttattctcacatctgccattagaaagcaggcaacaaatggagacacagataggtgctctgatactagccacagacatcagtcgccagaatgagtatctgtctttgtttaggtcccatttggatagaggtgatttatgcctagaagacaccagacacagacatttggttttacagatggctttgaaatgtgctgatatttgtaacccatgtcggacgtgggaattaagcaagcagtggagtgaaaaagtaacggaggaattcttccatcaaggagatatagaaaaaaaatatcatttgggtgtgagtccactttgcgatcgtcacactgaatctattgccancatccagattggtaactatacatatttagatatagctggttagaaaaatgccactgtttttatcaagaagggaaatatatttgaaatataaaatattaaaattatgctcatttctatttttaaaaataatttaagaaat

SEQ ID NO: 137 - DNA, 1063 bp, Homo sapiens
  SITE (378): n equals a,t,g, or c
  SITE (954): n equals a,t,g, or c
  SITE (987): n equals a,t,g, or c
  SITE (1054): n equals a,t,g, or c
cagctggcagcctcctgggtgatggagctgtctgtagttacaggcccatagttgactacatcgatgcgcagtttgaaaattatctgcaggaggagctgaagatccgccgctcgctcttcgactaccatgacacaaggatccacgtttgcctctacttcatcacgcccacagggcactccctgaagtctctagatctagtgaccatgaagaaactagacagcaaggtgaacattattcccatcatcgccaaggctgacaccatctccaagagcgagctccacaagttcaagatcaagatcatgggcgagttggtcagcaacggggtccagatctaccagttccccacggatgatgaggctgttgcagagattaacgcantcatgaatgcacatctgccctttgccgtggtgggcagcaccgaggaggtgaaggtggggaacaagctggtccgagcacggcagtacccctggggagtggtgcaggtggagaatgagaatcactgcracttcgtgaagctgcgggagatgttgatccgggtgaacatggaagacctccgcragcagacccacagccggcactacgagctctaccggcgctgcaagttggaggagatgggctttcaggacagcgatggtgacagccagcccttcagcctacaagagacatacgaggccaagaggaaggagttcctaagtgagctgcagaggaaggaggaagagatgaggcagatgtttgtcaacaaagtgaaggagacagagctggagctgaaggagaaggaaagggagctccatgagaagtttgagcacctgaagcgggtccaccaggaggagaagcgcaaggtggaggaaaagcgccgggaactggaggaggagaccaacgcctttcaatcgccggaagytgcggtggaggccctgcagtcgcagcctttgcacgccacytcgcagcagcccctgnaggaaggacaaggacaagaagaacagttcagtnttaggagcacaccagccgggccttgagcttttccagttcttaaggtgatgattgaccaagggccatnttggagcct

SEQ ID NO: 138 - DNA, 861 bp, Homo sapiens
  SITE (7): n equals a,t,g, or c
  SITE (9): n equals a,t,g, or c
  SITE (10): n equals a,t,g, or c
gcaggangnncgtcctggccgcgggatgctgggcggcgtcaggtaacyatggagaaagagctgcggacaccattcttttcaatgcctacaaaaaggagatatttaccaccaacaatggctacaaatccatgcagaaaaaacttcggagtaattggaagattcagagcttaaaagatgaaatcacatctgagaagttaaatggagtraaactgtggattacagctgggccaagggaaaaatttactgcagctgagtttgaaatcctgaagaaatatcttgacactggtggagatgtctttgtgatgctaggagaaggtggagaatccmgatttgacaccmatattaactttttactagaagaatatggaatcatggttaataatgatgctgtggttagaaatgtatatcacaaatawwwmcatcctaaagaagctctagtttccagtggagtcttgaacagggaaattagccgagctgcaggaaaggctgtgctgggatcattgatgaggaaagcagtggaaacaatgcccagtgagtgtgttttctgatgccacatgaggaagatgtatcattttggagtcttctttttcaaaatgaaaagagcttttgttctggttacaaaaataatcagaatttgaacagttcaagaggaaaaaagtagaagctctgcactggctctcacctttgtgtatccttttggtgccacattgagtgtcatgaaaccagcagtggcggtttctgtctacaggttctgtctgcttcccacttaacagacccattttggctttctatcactcaaagaaccaagggtgggaactgggcagtgcttggttcatgtcacatgttcaggtgatcaatatt

SEQ ID NO: 139 - DNA, 789 bp, Homo sapiens
  SITE (3): n equals a,t,g, or c
  SITE (53): n equals a,t,g, or c
  SITE (538): n equals a,t,g, or c
  SITE (648): n equals a,t,g, or c
  SITE (673): n equals a,t,g, or c
  SITE (717): n equals a,t,g, or c
  SITE (738): n equals a,t,g, or c
  SITE (763): n equals a,t,g, or c
ggncctccaccgcggtggcggccgctctagaactagtggatcccccgggctgnaggaattcggcacgagataagaccatggcacttaagaacattaactaccttctcatcttctacctcagtttctcactgcttatctacataaaaaattccttttgcaataaaaacaacaccaggtgcctctcaaattcttgccaaaacaattctacatgcaaagatttttcaaaagacaatgattgttcttgttcagacacagccaataatttggacaaagactgtgacaacatgaaagacccttgcttctccaatccctgtcaaggaagtgccacttgtgtgaacaccccaggagaaaggagctttctgtgcaaatgtcctcctgggtacagtgggacaatctgtgaaactaccattggttcctgtggcaagaactcctgccaacatggaggtatttgccatcaggaccctatttatcctgtctgcatctgccctgctggatatgctggaagattctgtgagatagatcacgatgagtgtgcttncaagcccttgccaaaatggggcccgtgtgccaggatggaattgatggktactcctgcttctgggcccaggatatcaakgcagacactgcgacttggaagtggatgaatgngcttcaagatcctgcaaggaacgangctacatgcctcaatggaaataaggaagatatacttggatctgnccccacaattattctgggggnaaactggggaaattgggaaattggncgaaatggttgggccccaagccttgg

SEQ ID NO: 140 - DNA, 924 bp, Homo sapiens
gggactcctctgtgctctgctctctctgctggcagggcatggctgggcagacacccgtgccatcggggccgaggaatgtcgccccaactcccagccttggcaggccggcctcttccaccttactcggctcttctgtggggcgaccctcatcagtgaccgctggctgctcacagctgcccactgccgcaagccgtatctgtgggtccgccttggagagcaccacctctggaaatgggagggtccggagcagctgttccgggttacggacttcttcccccaccctggcttcaacaaggacctcagcgccaatgaccacaatgatgacatcatgctgatccgcctgcccaggcaggcacgtctgagtcctgctgtgcagcccctcaacctcagccagacctgtgtctccccaggcatgcagtgtctcatctcaggctkgggggycgwrtccagccccaaggcgctstttccagtcacactgcagtgtgccaacatcagcatcctggagaacaaactctgtcactgggcataccctggccacatytcggacagcatgytctgtgcgggcctgtgggaggggggccgaggttcctgccagggtgactytgggggccccctggtttgcaatggaaccttggcaggcgtggtgtctgggggtgctgarccctgctccagaccccggcgccccgcagtytacaccagcgtatgccactaccttgactggatccaagaaatcatggagaactgagcccgcgcgccacgggggcaccttggaagaccaagagaggccgaagggcacggggtagggggttytcgtagggtcccagcctcaatggttcccgccctggacctccagctgccctgactcccctctggacactaagactccgcccctgaggctccgccccctcacgaggtcaagcaaga

SEQ ID NO: 141 - DNA, 834 bp, Homo sapiens
  SITE (2): n equals a,t,g, or c
  SITE (740): n equals a,t,g, or c
  SITE (758): n equals a,t,g, or c
  SITE (833): n equals a,t,g, or c
antcgccagctctaatacgactcactatagggaaagctggtacgcctgcaggtaccggtccggaattcccgggtcgacccacgcgtccgggcagtaagagagaagaaaatccaaagcatcttaaatcagaagataaggaatttaagagccttgccaataaatgcctcatcagttcaagttaatgcaatgagctcatcaacaggggagttaactgtccaagcaagttgtggtaaacgagttgttccattaaacgtcaacagaatagcatctggagtcattgcacccaaggcggcctggccttggcaagcttcccttcagtatgataacatccatcagtgtggggccaccttgattagtaacacatggcttgtcactgcagcacactgcttccagaagtataaaaatccacatcaatggactgttagttttggaacaaaaatcaaccctcccttaatgaaaagaaatgtcagaagatttattatccatgagaagtaccgctctgcagcaagagagtacgacattgctgttgtgcaggtctcttccagagtcaccttttcggatgacatacgccggatttgtttgccagaagcctctgcatccttcaaccaaatttgactgtccacatcacaggatttggagcactttactatggtggggaatcccaaaatgatctccaagaaccagagtgaaaatcataagtgacgatgtctgcaagcaaccacaggtgtatggcaatgatntaaacctggaatgtctgngccggatatatggaaggaattatgatgctgcagggtgatctgggggacctttagtcacaagggatctgaaagatnc

SEQ ID NO: 142 - DNA, 290 bp, Homo sapiens
  SITE (265): n equals a,t,g, or c
  SITE (274): n equals a,t,g, or c
gtctcggcacagcgcgtgctgcccttcgacgacaacatctgcctgcgggagccctgcgagaactacatgcgctgcgtgtcggtgctgcgcttcgactcctccgcgcccttcatcgcctcctcctccgtgctcttccggcccatccaccccgtcggagggctgcgctgccgctgcccgcccggcttcacgggtgactactgcgagaccgaggtggacctctgctactcgcggccctgtggcccccacgggcagctgccgcagccgngagggcggntacacctgcctctgtc

SEQ ID NO: 143 - DNA, 689 bp, Homo sapiens
  SITE (63): n equals a,t,g, or c
gcgccagggccggggcgggacgggacggaaaactggcggcttggtttgttcagcgcgtcgcgntcatggctctcgtttcaggcctccacggtgtgcacctggagtcaggagcgcgcttgtgcgtacagttcggttcagttactaaaagatgtaactgaactgcagatccttggtgaaatatctttcaacaaatctctatatgagggactgaatgcagagaaccacagaactaagatcactgtcgtcttcctgaaagatgagaagtaccattctttgcctatcatcattaaaggcagcgttggtggacttctggtgttgatcgtgattctggtcatcctgttcaagtgtggcttttttaaaagaaaatatcaacaactgaacttggagagcatcaggaaggcccagctgaaatcagagaatctgctcgaagaagagaattaggacctgctatccactgggagaggctatcagccagtcctgggacttggagacccagcatcctttgcattactttttccttcaggatgatctagagcagcatggagctgttggtagaatattagtttttaaccatacattgtcccaaaagtgtctgtgcattgtgcaaaaagtaaacttaggaaacatttggtattaaataaatttacacttttctttgcaaaaaaaaaaaaaaaaaaaaaaaaaaaaaa

SEQ ID NO: 144 - DNA, 867 bp, Homo sapiens
cacagagagaggcagcagcttgctcagcggacaaggatgctgggcgtgagggaccaaggcctgccctgcactcgggcctcctccagccagtgctgaccagggacttctgacctgctggccagccaggacctgtgtggggaggccctcctgctgccttggggtgacaatctcagctccaggctacagggagaccgggaggatcacagagccagcatggatcctgacagtgatcaacctytgaacagcctcgatgtcaaacccctgcgcaaaccccgtatccccatcatcatagcactactgagcctggcgagtatcatcattgtggttgtcctcatcaaggtgattctggataaatactacttcctctgcgggcagcctctccacttcatcccgaggaagcagctgtgtgacggagagctggactgtcccttgggggaggacgaggagcactgtgtcaagagcttccccgaagggcctgcagtggcagtccgcctctccaaggaccgatccacactgcaggtgctggactcggccacagggaactggttctctgcctgtttcgacaacttcacagaagctctcgctgagacagcctgtaggcagatgggctacagcagcaaacccactttcagagctgtggagattggcccagaccaggatctggatgttgttgaaatcacagaaaacagccaggagcttcgcatgcggaactcaagtgggccctgtctctcaggctccctggtctccctgcactgtcttgcctgtgggaagagcctgaagaccccccgtgtggtgkktggggaggaggcytctgtggattcttggccttggcargtcagcatccagtcgacaaacaagcactgtttg

SEQ ID NO: 145 - DNA, 658 bp, Homo sapiens
  SITE (597): n equals a,t,g, or c
ggggaaatgcaagaagaattatcagggccgaccttggagtccaggctsctatctccccatccccaaaggcactgcaaatacctgtatccccagyatttccagtattggtacgaatgtctgcgacaacgagctcctgcactgccagaacggagggacgtgccacaacaacgtgcgctgcctgtgcccggccgcatacacgggcatcctctgcgagaagctgcggtgcgaggaggctggcagctgcggctccgactctggccagggcgcgcccccgcacggctccccagcgctgctgctgctgaccacgctgctgggaaccgcagccccctggtgttctaggtgtcacctccagccacaccggacgggcctgtgccgtggggaagcagacacaacccaaacatttgctactaacataggaaacacacacatacagacacccccactcagacagtgtacaaactaagaaggcctaactgaactaagccatatttatcacccgtggacagcacatccgagtcaagactgttaatttctgactccagaggagttcggcagctgttgatattatcactgcaaatcacattgccagctgcaganatattgtggattggaaaggctgcgacagcccccaaacagggaagacacaaaacacacacat

SEQ ID NO: 146 - DNA, 1310 bp, Homo sapiens
cccacgcgtccggccaggcaggtgggcctcaggaggtgcctccaggcggccagtgggcctgaggccccagcaagggctagggtccatctccagtcccaggacacagcagcggccaccatggccacgcctgggctccagcagcatcagcagcccccaggaccggggaggcacaggtggcccccaccacccggaggagcagctcctgcccctgtccgggggatgactgattctcctccgccagccgtagggtgtgtgctgtccgggctcacggggaccctgtctccgagtcgttcgtgcagcgtgtgtaccagcccttcctcaccacctgcgacgggcaccgggcctgcagcacctaccgcaatatgccagccgccatgccggaacggagggagctgtgtccagcctggccgctgccgctgccctgcaggatggcggggtgacacttgccagtcagatgtggatgaatgcagtgctaggaggggcggctgtccccagcgctgcgtcaacaccgccggcagttactggtgccagtgttgggaggggcacagcctgtctgcagacggtacactctgtgtgcccaagggagggccccccagggtggcccccaacccgacaggagtggacagtgcaatgaaggaagaagtgcagaggctgcagtccagggtggacctgctggaggagaagctgcagctggtgctggccccactgcacagcctggcctcgcaggcactggagcatgggctcccggaccccggcagcctcctggtgcactccttccagcagctcggccgcatcgactccctgagcgagcagatttccttcctggaggagcagctggggtcctgctcctgcaagaaagactcgtgactgcccagcgccccaggctggactgagcccctcacgccgccctgcagcccccatgcccctgcccaacatgctgggggtccagaagccacctcggggtgactgagcggaaggccaggcagggccttcctcctcttcctcctccccttcctcgggaggctccccagaccctggcatgggatgggctgggatcttctctgtgaatccacccctggctacccccaccctggctaccccaacggcatcccaaggccaggtgggccctcagctgagggaaggtacgagctccctgctggagcctgggacccatggcacaggccaggcagcccggaggctgggtggggcctcagtgggggctgctgcctgacccccagcacaataaaaatgaaacgtgaaaaaaaaaaaaaaaaaaaaaaaaaaaaaaaaaaaaaaaaaaaaaaaaaaaa

SEQ ID NO: 147 - DNA, 554 bp, Homo sapiens
  SITE (496): n equals a,t,g, or c
gaattcggccttacggcacagtagagagcttccagggctggctggcgtgggatacccgtaccacagaaatgcagggaccattgcttcttccaggcctctgctttctgctgagcctctttggagctgtgactcagaaaaccaaaacttcctgtgcctcctcctggcggcctcacttttctcctgtgtaaagccatccagaacaccagcacctcactgcatctgcagctctcgctctgcctcttcctggcccacctcctcttcctcgtggggattgatcgaactgaacccaaggtgctgtgctccatcatcgccggtgctttgcatatctctacctggccgccttcacctggatgctgctggagggtgtgcacctcttcctcactgcacggaamctgacagtggtcaactactcaagcatcaatagactcatgaagtggatcatgttcccagtcggctatggcgttcccgctgtgactgtggccatttctgcagcctnctggcctcacctttatggaactgctgatcgatgctggcttcacctggaccagggattc

SEQ ID NO: 148 - DNA, 415 bp, Homo sapiens
  SITE (17): n equals a,t,g, or c
  SITE (41): n equals a,t,g, or c
  SITE (97): n equals a,t,g, or c
ctgagttctgagacatnccacactttcccagcaagatgggntcctgactcaaaccccagtgagggaratgccctccggacaagtgaagagaaaatantaaaactagaatattcaactccatatggaaaatcatatccatggatctctttggcattatgaagaatgaagctaaggaaaagggaattcattaaacatatcatccttggagaggaagtaatcaacctttacttcccaagctgtttgttctccacaataggctctcaacaaatgtgtgggaagggagggatgtgtgcatcctggaagagaagcaggctgtccctgaaggttctcaaaggttcagtgggaagaactcacgtgctcagcaaagctattgatgatgaccaagtgagagtaattctcctggcagaacatccgg

SEQ ID NO: 149 - DNA, 2241 bp, Homo sapiens
  SITE (3): n equals a,t,g, or c
  SITE (1201): n equals a,t,g, or c
ganggtcattttttttttttttttttttgaagagaaatgcaatttaccacacatttgttgagagcctattgtggagaacaaacagcttgggaagtaaaggttgattacttcctctccaaggatgatatgtttaatgaattcccttttccttagcttcattcttcataatgccaaagagatccatggatatgattttccatatggagttgaatattctagttttaatattttctcttcacttgtcctggaaaaacatccccctcactgggttttgagtcaggacccatcttgctggaaagtgtgtatgtctcagactcagattttgattttacgatctctctaaaccacttttgatattgtttctgracctgctggctgaggaggcagtagaccaagaagatgaagaagccttggaggctgttgatgatggtgaagaggtaggccatgacctgggcagctggacccacctgtagcaagcccagacaccatgtgcagcccaggatgaagagctgagctgttgctttgaaagccagcatccttgtgttctggatggttgacacttcactattgagggaggaaagttttcttttcaaaatccaaaagaccaagataaacaatactaaattcgcagagaaaatggcacagactgggccaaggaaactccacatgaatccctggtccaggtggagccagcatcgatcagcagttccataaaggtgaggccaggaggctgcagaaatggccacagtcacagcgggaacgccatagccgactgggaacatgatccacttcatgagtctattgatgcttgagtagttgaccactgtcaggttccgtgcagtgaggaagaggtgcacaccctccagcagcatccaggtgaaggcggccaggtagagatagtgcaaagcaccggcgatgatggagcacagcaccttgggttcagttcgatcaatccccacgaggaagaggaggtgggccaggaagaggcagagcgagagctgcagatgcagtgaggtgctggtgttctggatggctttacacaggagaaaagtgagggccgccaggaggaggcmcagcagagagmcgctcagccccacgtaggtgatgmcagtcagcacgggatcctcctcctggctggtcagggccatcargcagcgaagctggacaggtgactgcaattacacatggtgtgactcttgtncacgtgtawcrggaagcagccatccctggaccactggctgccctgccctgtgctcttccagtagacacagaagacctttttggtactgggggtcatcttcacgtgctggaaagtcagcgtcacagacttggagagagacacgttccttttgggtccaatagcagcactcacaacctgagagttcagatacacttgatctttcttatccatctcttcaaaaaaagttgcatttatgatgtttccaagagaagaatatgagataaaggcaatgrcactgggaccttgtgtgtctccctggatgatgtcactgcaacggatgtccattgagttcatttggacgttcaagttgaatgtctttctttcttcagagcaattgtctgtaatcgcttgagtttcaatagctacactatcgttttggattttcaggactttttgttctggatctttcaaggcagtttctagaactttcgattccacatcccggagaatagtggtagctgtggatgagatttcttgtctcccttctgttctccataaagtctgattggtgagaagtgactcaaatttgtccacaatcttttgcagctctttcctgccctgggttgtctttgaggaggtggtgtcctgacaggtgttctcattggaattactgaattgttcattcccagaatgcagtctatatcctgggacacattgacagtagaaacttccttcgacattgtaacacacagcgttaaatccacaatatacactatagggtggtgtacattcattaatgtcgttacatgtctccaaggggaatgtgaatagtttctgcccagatccagaagtatatccatggttgcaggtgcagtgagtgttattgacacaggaagcatttggggggcacttagcacaggaagttttggttttctgagtcacagctccaaagaggctcagcagaaagcagaggcctggaagaagcaatggtccctgcatttctgtggtacgggtatcccacgccagccagccctggaagctctctactgtgccgtaaggcc

SEQ ID NO: 150 - DNA, 1155 bp, Homo sapiens
ggcacattcggcacgagatggagtgaactgtgacaaagcaaactgctcaaccacctgctttaatggagggacctgtttctaccctggaaaatgtatttgccctccaggactagagggagagcagtgtgaaatcagcaaatgcccacaaccctgtcgaaatggaggtaaatgcattggtaaaagcaaatgtaagtgttccaaaggttaccagggagacctctgttcaaagcctgtctgcgagcctggctgtggtgcacatggaacctgccatgaacccaacaaatgccaatgtcaagaaggttggcatggaagacactgcaataaaaggtacgaagccagcctcatacatgccctgaggccagcaggcgcccagctcaggcagtacacgccttcacttaaaaaggccgaggagcggcgggatccacctgaatccaattacatctggtgaactccgacatctgaaacgttttaagttacaccaagttcatagcctttgttaacctttcatgtgttgaatgttcaaataatgttcattacacttaagaatactggcctgaattttattagcttcattataaatcactgagctgatatttactcttccttttaagttttctaagtacgtctgtagcatgatggtatagattttcttgtttcagtgctttgggacagattttatattatgtcaattgatcaggttaaaattttcagtgtgtagttggcagatattttcaaaattacaatgcatttatggtgtctgggggcaggggaacatcagaaaggttaaattgggcaaaaatgcgtaagtcacaagaatttggatggtgcagttaatgttgaagttacagcatttcagattttattgtcagatatttagatgtttgttacatttttaaaaattgctcttaatttttaaactctcaatacaatatattttgaccttaccattattccagagattcagtattaaaaaaaaaaaaattacactgtggtagtggcatttaaacaatataatatattctaaacacaatgaaatagggaatataatgtatgaactttttgcattggcttgaagcaatataatatattgtaaacaaaacacagctcttacctaataaacattttatactgttaaaaaaaaaaaaaaaaaaaaaa

SEQ ID NO: 151 - DNA, 547 bp, Homo sapiens
  SITE (5): n equals a,t,g, or c
ggggnccccccttttttttttttttttttttttttttgctgctttgacctgacgaatttattgaagagagctctgtccttctcccttctaccgagaagaggcggcttgcagggctggcacctgtccacacctgtcactgggcctttccctgggctaggctgagtgggagcagatgccctcatcctatgtgcagggcctgtgcaggagccatcacaccaccttgttgatgatgacacctagttcttcaatctcacactggacttcatcccccttcttgagaaagacaggaggtttcctgaatacaccgacacctgggggggtcccagttaggatgacatcccctgggtaaaaggtaacaaactgggagacccaggctatcaggtcctctgtcttgaataccatctggttggtgttgccgctctggaccacttccccattcactcggcagcagatctttaagttgtgtggatctgctacactgtccttggtcaccaaggcakggsccagacgaggaaaggtgtcggagggttttcccgcagccaattgt

SEQ ID NO: 152 - DNA, 766 bp, Homo sapiens
  SITE (690): n equals a,t,g, or c
  SITE (703): n equals a,t,g, or c
  SITE (706): n equals a,t,g, or c
  SITE (733): n equals a,t,g, or c
  SITE (735): n equals a,t,g, or c
  SITE (739): n equals a,t,g, or c
tttcgaaattaaccctcactaaagggaacaaaagctggagctccaccgcggtggcggccgctctagaactagtggatcccccgggctkyaggaattcggcacgagggtaactgggggtgttatactgagcagcagcgttgtgatgggtattggcattgcccaaatggaagggatgaaaccaattgtaccatgtgccagaaggaagaatttccatgttcccgaaatggtgtctgttatcctcgttctgatcgctgcaactaccagaatcattgcccaaatggctcagatgaaaaaaactgctttttttgccaaccaggaaatttccattgtaaaaacaatcgttgtgtgtttgaaagttgggtgtgtgattctcaagatgactgtggtgatggcagcgatgaagaaaattgcccagtaatcgtgcctacaagagtcatcactgctgccgtcatagggagcctcatctgtggcctgttactcgtcatagcattgggatgtacttgtaagctttattctctgagaatgtttgaaagaagatcatttgaaacacagttgtcaagartggaagcagaattggtaagaagagaacttctycctcgtatggmcaattgattgctcaaggkttaattcaccagttgaagaattttctggttggtcacctaatcargcttctggtttggaaaatctgangctaccggwccanctnaasttggaattactttatagctcttgnangcanacaagcacaatttggaaaccgattttt

SEQ ID NO: 153 - DNA, 1271 bp, Homo sapiens
  SITE (4): n equals a,t,g, or c
  SITE (11): n equals a,t,g, or c
  SITE (612): n equals a,t,g, or c
  SITE (1087): n equals a,t,g, or c
  SITE (1158): n equals a,t,g, or c
  SITE (1197): n equals a,t,g, or c
  SITE (1212): n equals a,t,g, or c
  SITE (1233): n equals a,t,g, or c
  SITE (1262): n equals a,t,g, or c
  SITE (1263): n equals a,t,g, or c
gccnctctgcngggctggcaggaaatgccaagacatagatgagtgcagccaggacccgagcctgtgccttccccatggggcctgcaagaaccttcagggctcctatgtgtgtgtctgcgatgagggcttcactcccacccaggaccagcacggttgtgaggaggtggagcagccccaccacaagaaggagtgctacctgaacttcgatgacacagtgttctgcgacagcgtattggccaccaacgtgacccagcaggagtgctgctgctctctgggggccggctggggcgaccactgcgaaatctacccctgcccagtctacagctcaggtcaggagccgggcaggccccttcccagatcttcagtttcttcatctggaagccaaatgtgggaaatggcgccccctggcagttgggaaataggcggcgggctgcagccctaagcccacgcgcgcactcagtcctgcctcttccctccccacggccgccctgcccctgcagccgagttccacagcctctgcccagacggaaagggctacacccaggacaacaacatcgtcaactacggcatcccagcccaccgtggtaagcgccctgcggctccgmccgcccngmgccctctcaccccgggttgggctcgcccggatcccgccgggactcgctgggtcagctgcccgcgccgggtaagccccgcccgsaccttcctcgcargccccgccctgtaggccccgcccytcctgtaggccccgcccggggatggcttcgctccggtggtgcgcccagcccacgcctccgggctgcarctgcgggaccggagcggccagtgtttgtcaccccgcagacatcgacgagtgcatgttgttcgggtcggagatttgcaaggagggcaagtgcgtgaacacgcagcctggctacgagtgctactgcaagcagggcttctactacgacgggaacctgctggaatgcgtggacgtggacgagtgcctggacgagtccaactgccggaacggagtgtgtgagaacacgcgcggcggctaccgctgtgcctgcacgccccctgccgagtacagtcccgcgcagcgccagtngcctgaaccccggaaagagatggacgtggacgagtggcaaggacccgggaagccttgccgcccttgcccgnttgcgtcaaaccttgccggggctcctacccgcttgcgantggtcggcccgcccntggggtgccccgggccccttncgggccgcgaattggccagcttccccgannagccccgg

SEQ ID NO: 154 - DNA, 405 bp, Homo sapiens
ttttttttttaaggagctgtttctataattgcatcttggagctgcagaatagcttgaatatttgaaggtcaactaaagggtcttaggaatgtttcagaaatgcaatgcaatgaaaaccccttcctccatactctaatagcgggtgagtagctgactcttccacaggtgagtataaaagctgtgtcaacagatgaagtaggggaaggcggttctaaggacattcaaggcgaaagttgttgagatgtacaggcttcccggggcctagtgcatgagcacagggaggtagagggtgaggaggagcggtctgwgggactctgcttcctgtctgggatggggcgggcttgccgggwgggggtttctcttgcagtggcttggtgcaacagtgatgtgaataggatttccctg

SEQ ID NO: 155 - protein, 153 aa, Homo sapiens
YDYENGFAIGPGGWGAANRLDYSYDDFLDTVQETATSIGNARSSRIKRSAPLSDYKIKLIFNITASVPLPDERNDTLEWENQQRLLQTLETITNKLKRTLNKDPMYSFQLASEILIAYSNSLETKKASPFCRPGLSAERAYVWVRTVPCDPKI

SEQ ID NO: 156 - protein, 61 aa, Homo sapiens
  SITE (15): Xaa equals any of the naturally occurring L-amino acids
VQLEYCFYPEAFSSXEHLMDCSQRALKATGSLTKVLSPFLHKELQPVCLQIYTASSLLLSV

SEQ ID NO: 157 - protein, 118 aa, Homo sapiens
EDSKPSTIYEQLFSFFSFFLLRQSHTLLPMLECSGVILAQCNFHLLGSSNSPASASRVAGITGMCHHVPLIFVFLGETGFHHIGQTGLELLTSSDLPTSASQSAEITGVSYCAKPTFL

SEQ ID NO: 158 - protein, 72 aa, Homo sapiens
AVSLPSFLFVLCSHILKCCTPRYSCLFSFNLGAQYPLFSDLPSGVSFLLPEVYPFVQVCWCQSKLFVCLKMP

SEQ ID NO: 159 - protein, 36 aa, Homo sapiens
FGVNLGGLRDAQIAGKTLFLDVSVRVFLEETSICIS

SEQ ID NO: 160 - protein, 190 aa, Homo sapiens
QEGWSLPGGAARGPATAQRGGGHPRAAAVAALPPWRSHSRTRQPLSSPPWVPDFPMEAAASSHACPPQQVGWDVSLSCRSPGWESRGRTSGLRPPHTHQGRFLAPCQSLAACLEAQSPQELKVTQWWQCVTEEGAKVGFENLGQGRADLGHRLRDPDRAGSDYNVVSTFMHPSCSSHWTLAFQGHDCLPD

SEQ ID NO: 161 - protein, 105 aa, Homo sapiens
FFLGFWDATLSWFSSCLRLILGPPTLSEASLQCWSSSGSVPVSLPICLQHSRVISPMSMSSVGPSFFFFLRLSLILSLTLECSGTISAHCNLPLPSSSDSPASAS

SEQ ID NO: 162 - protein, 95 aa, Homo sapiens
HKKTPSSMQVAWLFFVTTLFPSTYWCQCPSVLLWSCWCPSPNLRPPFLRESISPGALHRELSIKKGIFRTQGGAHSGSRTHGAAGAQGLQCSHWV

SEQ ID NO: 163 - protein, 553 aa, Homo sapiens
  SITE (393): Xaa equals any of the naturally occurring L-amino acids
GDHSHIEEAAMDGTLRRILVQKNLQRPTGLAVDYFSERIYWADFELSIIGSVLYDGSNSVVSVSSKQGLLHPHRIDIFEDYIYGAGPKNGVFRVQKFGHGSVEYLALNIDKTKGVLISHRYKQLDLPNPCLDLACEFLCLLNPSGATCVCPEGKYLINGTCNDDSLLDDSCKLTCENGGRCILNEKGDLRCHCWPSYSGERCEVNHCSNYCQNGGTCVPSVLGRPTCSCALGFTGPNCGKTVCEDFCQNGGTCIVTAGNQPYCHCQPEYTGDRCQYYVCHHYCVNSESCTIGDDGSVECVCPTRYEGPKCEVDKCVRCHGGHCIINKDSEDIFCNCTNGKIASSCQLCDGYCYNGGTCQLDPETNVPVCLCSTNWSGTQCERPAPKSSKSDHXSTRSIAIIVPLVLLVTLITTLVIGLVLCKRKRRTKTIRRQPIINGGINVEIGNPSYNMYEVDHDHNDGGLLDPGFMIDPTKARYIGGGPSAFKLPHTAPPIYLNSDLKGPLTAGPTNYSNPVYAKLYMDGQNCRNSLGSVDERKELLPKKIEIGIRETVA

SEQ ID NO: 164 - protein, 146 aa, Homo sapiens
FFFFFFLFNLEQNKSSVLPSLFLLLLCLQGYFLYYALILVLITFFLFSQGTNQQLNLVFLFSMISVQLPSQNETSPCYDLCQQGCPTNPILFRGKLFSEPTQELRSIQAKTDGNFLQNTFIMYMRSNLIFVVIVSVRRALLFLFHS

SEQ ID NO: 165 - protein, 239 aa, Homo sapiens
  SITE (72): Xaa equals any of the naturally occurring L-amino acids
  SITE (117): Xaa equals any of the naturally occurring L-amino acids
  SITE (166): Xaa equals any of the naturally occurring L-amino acids
  SITE (168): Xaa equals any of the naturally occurring L-amino acids
FELRASKELSLVFVLCSIPQIVFTSLTIKTALKLKMKQLKRKRKSNFSVQETQTLLKEITKRKEVIFSKQLXTTINVMKRMAWEEIAQCVNAVGEGEQRTGTEVKRRYLDWRALMKXKRMKANIKLVGSGFPLPSSDLDDSLTEEIDEKIGFRNDANFDWQNVADXRXAGGSLLRSRWKRKKGIRRVLNLKLRRRKKCCHPSYQIPGEKMNFPISPTLMSFLPLTQHHLDLHMMSLICS

SEQ ID NO: 166 - protein, 80 aa, Homo sapiens
CSQHQLLLLCLKAPLKKIAHLHFTSCNTMSVEEMPSGGFGECHNTYRVFSMVFCLDWGHVLRTGSHWLHLKDLGNKKSDL

SEQ ID NO: 167 - protein, 69 aa, Homo sapiens
LENYSSTDSWKRKKRFPFLPLPQKHKANPNNPIPNVVSHRTQGLKQYFMLVFLLYAENNLVIYIIEKSI

SEQ ID NO: 168 - protein, 254 aa, Homo sapiens
RIVTFNSRCLLLSCSLLSRNLLTNNSIFWLFHFKCHTDQPVYASLDLIVFFNRSNSLWRPSQDNISFFQGYDLRNIADDVGDGKNHGGCLTLLSQFAVDLEPELQLVRVRDLLLGHERADRAGRREALRQSPGQPLLLALVLHVPGGHIQAQGIAAHVVHGRSLGDCAAALAHHHAQLQLVVQVASVRGHEDGRALGRVGRGRLQEQHGLAQHRAAHLPDVVRVVPPHADDVLSPLPEAGQWPGCCHDSHQVPL

SEQ ID NO: 169 - protein, 340 aa, Homo sapiens
HELVPLHFSHTVDSLKPGFKDSPKCSQAGRIHSEFGVEFSQINQPDSNCTLSIANRLYGTKTMAFHQQYLSCSEKWYQARLQTVDFEQSTEETRKTINAWVENKTNGKVANLFGKSTIDPSSVMVLVNTIYFKGQRQNKFQVRETVKSPFQLSEGKNVTVEMMYQIGTFKLAFVKEPQMQVLELPYVNNKLSMIILLPVGIANLKQIEKQLNSGTFHEWTSSSNMMEREVEVHLPRFKLEIKYELNSLLKPPGVTDLFNQVKADLSGMSPTKGLYLSKAIHKSYLDVSEEGTEAAAATGDSIAVKSLPMRAQFKANHPFLFFIRHTHTNTILFCGKLASP

SEQ ID NO: 170 - protein, 220 aa, Homo sapiens
TSGDGVSAKMSTAAVPELKQISRVEAMRLGPGWSHSCHAMLYAANPGQLFGRIPMRFSVLMQMRFDGLLGFPGGFVDRRFWSLEDGLNRVLGLGLGCLRLTEADYLSSHLTEGPHRVVAHLYARQLTLEQLHAVEISAVHSRDHGLEVLGLVRVPLYTQKDRVGGFPNFLSNAFVSTAKCQLLFALKVLNMMPEEKLVEALAAATEKQKKALEKLLPASS

SEQ ID NO: 171 - protein, 38 aa, Homo sapiens
  SITE (22): Xaa equals any of the naturally occurring L-amino acids
  SITE (35): Xaa equals any of the naturally occurring L-amino acids
AQSLPEGFMSEKTSFGFYAVPXSLDPLVSTCSARXPLA

SEQ ID NO: 172 - protein, 377 aa, Homo sapiens
AREKQRVPQRERKRHDFSLFKLSDTEMRVKISPQLLLATHRFMATEVEPFKSLYLSEKILLRLLKHPNVIQELKFDEKNKKAPEHYLYQRNRPVDYFVLLLQGKVEVEVGKEGLRFENGAFTYYGVPAIMTTACSDNDVRKVGSLAGSSVFLNRSPSRCSGLNRSESPNRERSDFGGSNTQLYSSSNNLYMPDYSVHILSDVQFVKITRQQYQNALTACHMDSSPQSPDMEAFTDGDSTKAPTTRGTPQTPKDDPAITLLNNRNSLPCSRSDGLRSPSEVVYLRMEELAFTQEEMTDFEEHSTQQLTLSPAAVPTRAASDSECCNINLDTETSPCSSDFEENVGKKLLRTLSGQKRKRSPEGERTSEDNSNLTPLIT

SEQ ID NO: 173 - protein, 40 aa, Homo sapiens
QSHNRAMLMTACDLSAITKPWPIQQRVCYLVTITIIKKSK

SEQ ID NO: 174 - protein, 256 aa, Homo sapiens
GSTHASGEIVMAAAILAEKVPVDSAEEREQPLAAAAELAAQKREQRLRKFRELHLKRNEARKLNHQEVVEEDKRLKLPANWEARKARLEWELQEEEKKKECAARGEDYEKVKLLEISAEDAERWERKKRRKNPDLGFSDYAAAQLRQYHRLTKQIKPDMETYERLREKHGEEFFPTSNSLLHGTHVPSTEEVDRMVMDLEKQIEKRDKYSRRRPYNDDADIDYINERNAKFNKKAERFYGKYTAEIKQNLERGTAV

SEQ ID NO: 175 - protein, 249 aa, Homo sapiens
REASISWMRWQPSLLPQSMTWITREGPTLSSAMQAVSLLCSTMTLLFWRVTTPPWPSSSRSRTPNATFSRILTGTIIERCARAIIDMVLATEMTKHFEHVNKFVNSINKPMAAEIEGSDCECNPAGKNFPENQILIKRMMIKCADVANPCRPLDLCIEWAGRISEEYFAQTDEEKRQGLPVVMPVFDRNTCSIPKSQISFIDYFITDMFDAWDAFAHLPALMQHLADNYKHWKTLDDLKCKSLRLPSDS

SEQ ID NO: 176 - protein, 251 aa, Homo sapiens
FRKGPQSYKEVEQRAVNPIQLPLENGVSEKTGHPLHSTTPSPCCQAQSLPALWQPDQSPRTSINGDRPQPSTHVFPKTLFQEMNVNECGMKPRPCQHRCVNTHGSYKCFCLSGHMLMPDATCVNSRTCAMINCQYSCEDTEEGPQCLCPSSGLRLAPNGRDCLDIDECASGKVICPYNRRCVNTFGSYYCKCHIGFELQYISGRYDCIDINECTMDSHTCSHHANCFNTQGSFKCKCKQGYKGNGLRCSGK

SEQ ID NO: 177 - protein, 134 aa, Homo sapiens
GEGNVMYQHHNWQGALLDYPVSKVVCVGSNYAKHIKEMGSAVPEEPVLFIKPETALCDLRQPLAIPSDFGSVHHEVELAVLIGATLRQATEEHVRKAIAGYGVALDLTLRDVQGKMKKAGQPWEKAKAFDNSCP

SEQ ID NO: 178 - protein, 173 aa, Homo sapiens
DNHTMRGTPGDADGGGRAVYQSMCKPITGTINDLNQQVWTLQGQNLVAVPRSDSVTPVTVAVITCKYPEALEQGRGDPIYLGIQNPEMCLYCEKVGEQPTLQLKEQKIMDLYGQPEPVKPFLFYRAKTGRTSTLESVAFPDWFIASSKRDQPIILTSELGKSYNTAFELNIND

SEQ ID NO: 179 - protein, 432 aa, Homo sapiens
GTCTAIKADSYICLCPLGFKGRHCEDAFTLTIPQFRESLRSYAATPWPLEPQHYLSFMEFEITFRPDSGDGVLLYSYDTGSKDFLSINLAGGHVEFRFDCGSGTGVLRSEDPLTLGNWHELRVSRTAKNGILQVDKQKIVEGMAEGGFTQIKCNTDIFIGGVPNYDDVKKNSGVLKPFSGSIQKIILNDRTIHVKHDFTSGVNVENAAHPCVRAPCAHGGSCRPRKEGYDCDCPLGFEGLHCQKAIIEAIEIPQFIGRSYLTYDNPDILKRVSGSRSNVFMRFKTTAKDGLLLWRGDSPMRPNSDFISLGLRDGALVFSYNLGSGVASIMVNGSFNDGRWHRVKAVRDGQSGKITVDDYGARTGKSPGMMRQLNINGALYVGGMKEIALHTNRQYMRGLVGCISHFTLSTDYHISLVEDAVDGKNINTCGAK

SEQ ID NO: 180 - protein, 310 aa, Homo sapiens
AFEAGGGEERVGLLYRDPLPMWICPGGGGGGGDREDARLRPALLWALLALWLCCATPAHALQCRDGYEPCVNEGMCVTYHNGTGYCKCPEGFLGEYCQHRDPCEKNRCQNGGTCVAQAMLGKATCRCASGFTGEDCQYSTSHPCFVSRPCLNGGTCHMLSRDTYECTCQVGFTGKECQWTDACLSHPCANGSTCTTVANQFSCKCLTGFTGQKCETDVNECDIPGHCQHGGTCLNLPGSYQCQCLQGFTGQYCDSLYVPCAPSPCVNGGTCRQTGDFTFECNCLPETVRRGTELWERDREVWNGKEHDEN

SEQ ID NO: 181 - protein, 323 aa, Homo sapiens
EAGHCRGSQLGCRGEDEAAEGEREKDGGLRREKDAAEMLGAKIKAMESKLLVGGKNIVDHTNEQQKILEQKRQEIAEQKRREREIQQQMESRDEETLELKETYSSLQQEVDIKTKKLKKLFSKLQAVKAEIHDLQEEHIKERQELEQTQNELTRELKLKHLIIENFIPLEEKSKIMNRAFFDEEEDHWKLHPITRLENQQMMKRPVSAVGYKRPLSQHARMSMMIRPEARYRAENIVLLELDMPSRTTRDYEGPAIAPKVQAALDAALQDEDEIQVDASSFESTANKKSKARPKSGRKSGSSSSSSGTPASQLYPQSRGLVPK

SEQ ID NO: 182 - protein, 121 aa, Homo sapiens
GTSPSPQTTVVSTAEDLAPKSATFAVQSSTQSPTTLSSSASVNSCAVNPCLHNGECVADNTSRGYHCRCPPSWQGDDCSVDVNECLSNPCPSTATWQQYSGILYLQMPGWVPVGKRDMQFG

SEQ ID NO: 183 - protein, 552 aa, Homo sapiens
DHSHIEEAAMDGTLRRILVQKNLQRPTGLAVDYFSERIYWADFELSIIGSVLYDGSNSVVSVSSKQGLLHPHRIDIFEDYIYGAGPKNGVFRVQKFGHGSVEYLALNIDKTKGVLISHRYKQLDLPNPCLDLACEFLCLLNPSGATCVCPEGKYLINGTCNDDSLLDDSCKLTCENGGRCILNEKGDLRCHCWPSYSGERCEVNHCSNYCQNGGTCVPSVLGRPTCSCALGFTGPNCGKTVCEDFCQNGGTCIVTAGNQPYCHCQPEYTGDRCQYYVCHHYCVNSESCTIGDDGSVECVCPTRYEGPKCEVDKCVRCHGGHCIINKDSEDIFCNCTNGKIASSCQLCDGYCYNGGTCQLDPETNVPVCLCSTNWSGTQCERPAPKSSKSDHISTRSIAIIVPLVLLVTLITTLVIGLVLCKRKRRTKTIRRQPIINGGINVEIGNPSYNMYEVDHDHNDGGLLDPGFMIDPTKARYIGGGPSAFKLPHTAPPIYLNSDLKGPLTAGPTNYSNPVYAKLYMDGQNCRNSLGSVDERKELLPKKIEIGIRETVA

SEQ ID NO: 184 - protein, 330 aa, Homo sapiens
  SITE (244): Xaa equals any of the naturally occurring L-amino acids
  SITE (265): Xaa equals any of the naturally occurring L-amino acids
REQKLELHRGGGRSRTSGSPGLQEFGTSASEGEPCGGPLDSPCGESLECVRGLCRCRWSHAVCGTDGHTYANVCALQAASRRALQLSGTPVRQLQKGACPLGLHQLSSPRYKFNFIADVVEKIAPAVVHIELFLRHPLFGRNVPLSSGSGFIMSEAGLIITNAHVVSSNSAAPGRQQLKVQLQNGDSYEATIKDIDKKSDIATIKIHPKKKLPVLLLGHSADLRPGEFVVAIGSPFALQNTVTXGIVSTAQREGRELGLRDSDMXYIQTDAIINYGNSGGPLVNLDGEVIGINTLKVTAGISFAIPSDRITRFLTEFQDKQIKAPSLAVH

SEQ ID NO: 185 - protein, 145 aa, Homo sapiens
  SITE (23): Xaa equals any of the naturally occurring L-amino acids
GKLVRLQVPVPEFPGRPTRPPTXLQALRMVQRLTYRRRLSYNTASNKTRLSRTPGNRIVYLYTKKVGKAPKSACGVCPGRLRGVRAVRPKVLMRLSKTKKHVSRAYGGSMCAKCVRDRIKRAFLIEEQKIVVKVLKAQAQSQKAK

SEQ ID NO: 186 - protein, 152 aa, Homo sapiens
DWTRSSPQWLGLRRGMGFFSKETPFSSTLVPAQETPRSFECTCPRGFYGLRCEVSGVTCADGPCFNGGLCVGGADPDSAYICHCPPGFQGSNCEKRVDRCSLQPCRNGEAWRPERRGMGWGSWMAQTVQGWNPGFDSSNPRAWGPDLPPASL

SEQ ID NO: 187 - protein, 205 aa, Homo sapiens
RSKGLGADAYAGIARWQPQQPFSPLSCRPCSESQEIHRSGMNSERSEVEGSAGEERRISRGHEKARIQGQAAFCFFMGGPPASGTLELLGGGAAGGGDKTPDATFLGPFLGDSAGRGMPESSYTLRFTVAFIWAPAGEESATGCSCIVSSPSFVKAAPAAEKISPTFVDADVMAPRASSRRRRRRRYTRAGTTESRETERLADAW

SEQ ID NO: 188 - protein, 348 aa, Homo sapiens
ARWATRLQLPLSPGFPAAEDDPHRCVDTDECQIAGVCQQMCVNYVGGFECYCSEGHELEADGISCSPAGAMGAQASQDLGDELLDDGEDEEDEDEAWKAFNGGWTEMPGILWMEPTQPPDFALAYRPSFPEDREPQIPYPEPTWPPPLSAPRVPYHSSVLSVTRPVVVSATHPTLPSAHQPPVIPATHPALSCDPPHTQLCPLTTRSPWWQPTIQICLLPTNPVFSCLSFSTASSATQPAALPTLLPSQSPTNQTSPISPTHPHSKAPQIPREDGPSPKLALWLPSPAPTAAPTALGEAGLAEHSQRDDRWLLVALLVPTCVFFGGPACTGHRVLHPLWPPCTQQAHH

SEQ ID NO: 189 - protein, 174 aa, Homo sapiens
PGRPTRPNECIPHNGCRHGTCSTPWQCTCDEGWGGLFCDQDLNYCTHHSPCKNGATCSNSGQRSYTCTCRPGYTGVDCELELSECDSNPCRNGGSCKDQEDGYHCLCPPGYYGLHCEHSTLSCADSPCFNGGSCRERNRGPTMLVNVPPTSPAPTARRKWTGAPATPVPTGDSA

SEQ ID NO: 190 - protein, 125 aa, Homo sapiens
MLGIEIINYFLISLLSSGERIGLEQALQCRDGYEPCVNEGMCVTYHNGTGYCKCPEGFLGEYCQHRDPCEKNRCQNGGTCVNGGTCRQTGDFTFECNCLPETVRRGTELWERDREVWNGKEHDEN

SEQ ID NO: 191 - protein, 695 aa, Homo sapiens
TPFLKHFCSPLPESLRMLPGCIFLMILLIPQVKEKFILGVEGQQLVRPKKLPLIQKRDTGHTHDDDILKTYEEELLYEIKLNRKTLVLHLLRSREFLGSNYSETFYSMKGEAFTRHPQIMDHCFYQGSIVHEYDSAASISTCNGLRGFFRINDQRYLIEPVKYSDEGEHLVFKYNLRVPYGANYSCTELNFTRKTVPGDNESEEDSKIKGIHDEKYVELFIVADDTVYRRNGHPHNKLRNRIWGMVNFVNMIYKTLNIHMTLVGIEIWTHEDKIELYSNIETTLLRFSFWQEKILKTRKDFDHVVLLSGKWLYSHVQGISYPGGMCLPYYSTSIIKDLLPDTNIIANRMAHQLGHNLGMQHDEFPCTCPSGKCVMDSDGSIPALKFSKCSQNQYHQYLKDYKPTCMLNIPFPYNFHDFQFCGNKKLDEGEECDCGPAQECTNPCCDAHTCVLKPGFTCAEGECCESCQIKKAGSICRPAKDECDFPEMCTGHSPACPKDQFRVNGFPCKNSEGYCFMGKCPTREDQCSELFDDEAIESHDICYKMNTKGNKFGYCKNKENRFLPCEEKDVRCGKIYCTGGELSSLLGEDKTYHLKDPQKNATVKCKTIFLYHDSTDIGLVASGTKCGEGMVCNNGECLNMEKVYISTNCPSQCHENPVDGHGLQCHCEEGQAPVACEETLHVTNITILVVVLVQN

SEQ ID NO: 192 - protein, 168 aa, Homo sapiens
ARGAMTASAQPRGRRPGVGVGVVVTSCKHPRCVLLGKRKGSVGAGSFQLPGGHLEFGETWEECAQRETWEEAALHLKNVHFASVVNSFIEKENYHYVTILMKGEVDVTHDSEPKNVEPEKNESWEWVPWEELPPLDQLFWGLRCLKEQGYDPFKEDLNHLVGYKGNHL

SEQ ID NO: 193 - protein, 266 aa, Homo sapiens
CVDGVAGYRCTCVKGFVGLHCETEVNECQSNPCLNNAVCEDQVGGFMCKCPPGFLGTRCGKNVDECLSQPCKNGATCKDGANSFRCLCAAGFTGSHCELNINECQSNPCRNQATCVDELNSYSCKCQPGFSGQRCETEQSTGFNLDFEVSGIYGYVMLDGMLPSLHALTCTFWMKSSDDMNYGTPISYAVDNGSDNTLLLTDYNGWVLYVNGREKITNCPSVNDGRWHHIAITWTSANGIWKVYIDGKLSDGGAGLSVGLPIPGMF

SEQ ID NO: 194 - protein, 196 aa, Homo sapiens
  SITE (1): Xaa equals any of the naturally occurring L-amino acids
  SITE (4): Xaa equals any of the naturally occurring L-amino acids
XVRXLEINPTKGNKSWSSTAVAAALELVDPPGCRNSARAGTDYVLKDHSRCTVTGWGLSKADGMWPQFRTIQEKEVIILNNKECDNFYHNFTKIPTLVQIIKSQMMCAEDTHREKFCYELTGEPLVCSMEGTWYLVGLVSWGAGCQKSEAPPIYLQVSSYQHWIWDCLNGQALALPAPSRTLLLALPLPLSLLAAL

SEQ ID NO: 195 - protein, 237 aa, Homo sapiens
KPSPDCLSAEGELRCRRLLAGATARLRARPASAAVLVPLCSVRGVPALLYTLRSSRLTGRHKGDVSFPGGKCDPADQDVVHTALRETREELGLAVPEEHVWGLLRPVYDPQKATVVPVLAGVGPLDPQSLRPNSEEVDEVFALPLAHLLQTQNQGYTHFCRGGHFRYTLPVFLHGPHRVWGLTAVITEFALQLLAPGTYQPRLAGLTCSGAEGLARPKQPLASPCQASSTPGLNKGL

SEQ ID NO: 196 - protein, 67 aa, Homo sapiens
NGEQRQQGTTADMIHKIVPLIAYMSKFFTLKAGDVVLTGTPDGSGPLQSGDELTVTFDGHSLTTRVL

SEQ ID NO: 197 - protein, 813 aa, Homo sapiens
LVPRGAGAACCRLWGVAMPTTQQSPQDEQEKLLDEAIQAVKVQSFQMKRCLDKNKLMDALKHASNMLGELRTSMLSPKSYYELYMAISDELHYLEVYLTDEFAKGRKVADLYELVQYAGNIIPRLYLLITVGVVYVKSFPQSRKDILKDLVEMCRGVQHPLRGLFLRNYLLQCTRNILPDEGEPTDEETTGDISDSMDFVLLNFAEMNKLWVRMQHQGHSRDREKRERERQELRILVGTNLVRLSQLEGVNVERYKQIVLTGILEQVVNCRDALAQEYLMECIIQVFPDEFHLQTLNPFLRACAELHQNVNVKNIIIALIDRLALFAHREDGPGIPADIKLFDIFSQQVATVIQSRQDMPSEDVVSLQVSLINLAMKCYPDRVDYVDKVLETTVEIFNKLNLEHIATSSAVSKELTRLLKIPVDTYNNILTVLKLKHFHPLFEYFDYESRKSMSCYVLSNVLDYNTEIVSQDQVDSIMNLVSTLIQDQPDQPVEDPDPEDFADEQSLVGRFIHLLRSEDPDQQYLILNTARKHFGAGGNQRIRFTLPPLVFAAYQLAFRYKENSKVDDKWEKKCQKIFSFAHQTISALIKAELAELPLRLFLQGALAAGEIGFENHETVAYEFMSQAFSLYEDEISDSKAQLAAITLIIGTFERMKCFSEENHEPLRTQCALAASKLLKKPDQGRAVSTCAHLFWSGRNTDKNGEELHGGKRVMECLKKALKIANQCMDPSLQVQLFIEILNRYIYFYEKENDAVTIQVLNQLIQKIREDLPNLESSEETEQINKHFHNTLEHLRLRRESPESEGPIYEGLIL

SEQ ID NO: 198 - protein, 231 aa, Homo sapiens
  SITE (44): Xaa equals any of the naturally occurring L-amino acids
EKETLKPKMTWRHHVRLLFTVSLALQIINLGNSYQREKHNGGRXEVTKVATQKHRQSPLNWTSSHFGEVTGSAEGWGPEEPLPYSRAFGEGASARPRCCRNGGTCVLGSFCVCPAHFTGRYCEHDQRRSECGALEHGAWTLRACHLCRCIFGALHCLPLQTPDRCDPKDFLASHAHGPSAGGAPSLLLLLPCALLHRLLRPDAPAHPRSLVPSVLQRERRPCGRPGLGHRL

SEQ ID NO: 199 - protein, 242 aa, Homo sapiens
VLPAWEGGPGGGGRTSCLAWAVGWKWVFRRPPRLLRGLVGMAHLGPGSSGWGPPHFHRCPPEACCPWEEEAGQSGLALCSESSGLLAWKGGALLMVTVRQTQWSSRIWKWGLWVGQVLRECPHLGLWVLPSVGMKGLESQSWGAAALVSAPAPGLRRVVGGAGLGRCLTWAGWPRPETAESSRRLGGFPHLGGGRPAAQPISLEHRVGRALGEGSHKKPGGRRPAATGVPSPQPPPRARGCR

SEQ ID NO: 200 - protein, 877 aa, Homo sapiens
HEGAWSAWQPWGTCSESCGKGTQTRARLCNNPPPAFGGSYCDGAETQMQVCNERNCPIHGKWATWASWSACSVSCGGGARQRTRGCSDPVPQYGGRKCEGSDVQSDFCNSDPCPTHGNWSPWSGWGTCSRTCNGGQMRRYRTCDNPPPSNGGRACGGPDSQIQRCNTDMCPVDGSWGSWHSWSQCSASCGGGEKTRKRLCDHPVPVKGGRPCPGDTTQVTRCNVQACPGGPQRARGSVIGNINDVEFGIAFLNATITDSPNSDTRIIRAKITNVPRSLGSAMRKIVSILNPIYWTTAKEIGEAVNGFTLTNAVFKRETQVEFATGEILQMSHIARGLDSDGSLLLDIVVSGYVLQLQSPAEVTVKDYTEDYIQTGPGQLYAYSTRLFTIDGISIPYTWNHTVFYDQAQGRMPFLVETLHASSVESDYNQIEETLGFKIHASISKGDRSNQCPSGFTLDSVGPFCADEDECAAGNPCSHSCHNAMGTYYCSCPKGLTIAADGRTCQDIDECALGRHTCHAGQDCDNTIGSYRCVVRCGSGFRRTSDGLSCQDINECQESSPCHQRCFNAIGSFHCGCEPGYQLKGRKCMDVNECRQNVCRPDQHCKNTRGGYKCIDLCPNGMTKAENGTCIDIDECKDGTHQCRYNQICENTRGSYRCVCPRGYRSQGVGRPCMDIDECENTDACQHECKNTFGSYQCICPPGYQLTHNGKTCQDIDECLEQNVHCGPNRMCFNMRGSYQCIDTPCPPNYQRDPVSGFCLKNCPPNDLECALSPYALEYKLVSLPFGIATNQDLIRLVAYTQDGVMHPRTTFLMVDEEQTVPFALRDENLKGVVYTTRPLREAETYRMRVRASSYSANGTIEYQTTFIVYIAVSAYPY

SEQ ID NO: 201 - protein, 610 aa, Homo sapiens
  SITE (284): Xaa equals any of the naturally occurring L-amino acids
  SITE (285): Xaa equals any of the naturally occurring L-amino acids
  SITE (453): Xaa equals any of the naturally occurring L-amino acids
  SITE (598): Xaa equals any of the naturally occurring L-amino acids
IICSDPQLPSGPSNRTSQVKVVEVKPDMFPPYKYSCTVTLDLGLATSRGRGKCKNPSCSYVYTNRHKPRICPSCGVNLAKDRTEKTTKAIEVSSPLPDVLNATEPLSTAQREIQRQSTLQLLRKVLQIPENESELAEVFALIHELNSSRLILSNVSEETVTIEQTSWSNYYESPSTQCLLCSSPLFKGGQNSLAGPQECWLLTASRLQTVTAQVKMCLNPHCLALHSFIDIYTGLFNVGNKLLVSLDLLFAIRNQIKLGEDPRVSINVVLKSVQEQTEKTLTSXXLSQLQELLCNGYWAFECLTVRDYNDMICGICGVAPKVEMAQRSEENVLALKSVEFTWPEFLGSNEVNVEDFWATMETEVIEQVAFPASIPITKFDASVIAPFFPPLMRGAVVVNTEKDKNLDVQPVPGSGSALVRLLQEGTCKLDEIGSYSEEKLQHLLRQCGIPFGXEDSKDQLCFSLLALYESVQNGARAIRPPRHFTGGKIYKVCPHQVVCGSKYLVRGESARDHVDLLASSRHWPPVYVVDMATSALCADLCYPELTNQMWGRNQGCFSSPTEPPVSVSCPELLDQHYTVDMTETEHSIQHPVTKTATXRIRPCRPTAQSG

SEQ ID NO: 202 - protein, 234 aa, Homo sapiens
PTQTWSPWEPQDGGPPSSLAPRSAQLNSKRYLILIYSVEFDRIHYPLPLPYQGKPDPVVLQGIIRSLKEELGRLQGLDGQNTRDTRENEIWHLREQVSRLASEKRELEAQLGRSREEALAGRAARQEAEALRGLVRGLELELRQERGLGHRVAGRRGQDCRRLAKELEEAKASERSLRARLKTLTSELALYKRGRRTPPVQPPPTREDRASSSRERSASRGRGAARSSSRESGR

SEQ ID NO: 203 - protein, 176 aa, Homo sapiens
LLQDSLGGNAKTVMVANVGPASYNVEETLTTLRYANRAKNIKNKPRVNEDPKDALLREFQEEGEEEGDDKDDYWREQQEKLEIEKRAIVEDHSLVAEEKMRLLKEKEKKMEDLRREKDAAEMLGAKIKAMESKLLVGGKNIVDHTNEQQKILEQKRQEIAEQKRREREIQQQMESR

SEQ ID NO: 204 - protein, 1139 aa, Homo sapiens
ARGVPVECPQPEKIPNGIIDVQGLAYLSTALYTCKPGFELVGNTTTLCGENGHWLGGKPTCKAIECLKPKEILNGKFSYTDLHYGQTVTYSCNRGFRLEGPSALTCLETGDWDVDAPSCNAIHCDSPQPIENGFVEGADYSYGAIIIYSCFPGFQVAGHAMQTCEESGWSSSIPTCMPIDCGLPPHIDFGDCTKLKDDQGYFEQEDDMMEVPYVTPHPPYHLGAVAKTWENTKESPATHSSNFLYGTMVSYTCNPGYELLGNPVLICQEDGTWNGSAPSCISIECDLPTAPENGFLRFTETSMGSAVQYSCKPGHILAGSDLRLCLENRKWSGASPRCEAISCKKPNPVMNGSIKGSNYTYLSTLYYECDPGYVLNGTERRTCQDDKNWDEDEPICIPVDCSSPPVSANGQVRGDEYTFQKEIEYTCNEGFLLEGARSRVCLANGSWSGATPDCVPVRCATPPQLANGVTEGLDYGFMKEVTFHCHEGYILHGAPKLTCQSDGNWDAEIPLCKPVNCGPPEDLAHGFPNGFSFIHGGHIQYQCFPGYKLHGNSSRRCLSNGSWSGSSPSCLPCRCSTPVIEYGTVNGTDFDCGKAARIQCFKGFKLLGLSEITCEADGQWSSGFPHCEHTSCGSLPMIPNAFISETSSWKENVITYSCRSGYVIQGSSDLICTEKGVWSQPYPVCEPLSCGSPPSVANAVATGEAHTYESEVKLRCLEGYTMDTDTDTFTCQKDGRWFPERISCSPKKCPLPENITHILVHGDDFSVNRQVSVSCAEGYTFEGVNISVCQLDGTWEPPFSDESCSPVSCGKPESPEHGFVVGSKYTFESTIIYQCEPGYELEGNRERVCQENRQWSGGVAICKETRCETPLEFLNGKADIENRTTGPNVVYSCNRGYSLEGPSEAHCTENGTWSHPVPLCKPNPCPVPFVIPENALLSEKEFYVDQNVSIKCREGFLLQGHGIITCNPDETWTQTSAKCEKISCGPPAHVENAIARGVHYQYGDMITYSCYSGYMLEGFLRSVCLENGTWTSPPICRAVCRFPCQNGGICQRPNACSCPEGWMGRLCEEPICILPCLNGGRCVAPYQCDCPPGWTGSRCHTAVCQSPCLNGGKCVRPNRCHCLSSWTGHNCSRKRRTGF

SEQ ID NO: 205 - protein, 179 aa, Homo sapiens
SCRGRCQCRERTFGARCDRYCQCFRGRCHPVDGTCACEPGYRGKYCREPCPAGFYGLGCRRRCGQCKGQQPCTVAEGRCLTCEPGWNGTKCDQPCATGFYGEGCSHRCPPCRDGHACNHVTGKCTRCNAGWIGDRCETKCSNGTYGEDCAFVCADCGSGHCDFQSGRCLCSPGVHGPHC

SEQ ID NO: 206 - protein, 492 aa, Homo sapiens
ARATGAAGRDGRLRVGLRLLEVNQQSLLGLTHGEAVQLLRSVGDTLTVLVCDGFEASTDAALEVSPGVIANPFAAGIGHRNSLESISSIDRELSPEGPGKEKELPGQTLHWGPEATEAAGRGLQPLKLDYRALAAVPSAGSVQRVPSGAAGGKMAESPCSPSGQQPPSPPSPDELPANVKQAYRAFAAVPTSHPPEDAPAQPPTPGPAASPEQLSFRERQKYFELEVRVPQAEGPPKRVSLVGADDLRKMQEEEARKLQQKRAQMLREAAEAGAEARLALDGETLGEEEQEDEQPPWASPSPTSRQSPASPPPLGGGAPVRTAKAERRHQERLRVQSPEPPAPERALSPAELRALEAEKRALWRAARMKSLEQDALRAQMVLSRSQEGRGTRGPLERLAEAPSPAPTPSPTPVEDLGPQTSTSPGRLSPDFAEELRSLEPSPSPGPQEEDGEVALVLLGRPSPGAVGPEDVALCSSRRPVRPGRRGLGPVPS

SEQ ID NO: 207 - protein, 351 aa, Homo sapiens
  SITE (3): Xaa equals any of the naturally occurring L-amino acids
  SITE (5): Xaa equals any of the naturally occurring L-amino acids
  SITE (13): Xaa equals any of the naturally occurring L-amino acids
  SITE (17): Xaa equals any of the naturally occurring L-amino acids
RDXWXAIPDTIDXTPAXTGPEFPGRPTRPPAPPAMVVSGAPPALGGGCLGTFTSLLLLASTAILNAARIPVPPACGKPQQLNRVVGGEDSTDSEWPWIVSIQKNGTHHCAGSLLTSRWVITAAHCFKDNLNKPYLFSVLLGAWQLGNPGSRSQKVGVAWVEPHPVYSWKEGACADIALVRLERSIQFSERVLPICLPDASIHLPPNTHCWISGWGSIQDGVPLPHPQTLQKLKVPIIDSEVCSHLYWRGAGQGPITEDMLCAGYLEGERDACLGDSGGPLMCQVDGAWLLAGIISWGEGCAERNRPGVYISLSAHRSWVEKIVQGVQLRGRAQGGGALRAPSQGSGAAARS

SEQ ID NO: 208 - protein, 432 aa, Homo sapiens
  SITE (419): Xaa equals any of the naturally occurring L-amino acids
AEAGRAYSMEVCYQLPVLPLDRPVPQHVLSRRGAISFSSSSALFGCPNPRQLSQRRGAISYDSSDQTALYIRMLGDVRVRSRAGFESERRGSHPYIDFRIFHSQSEIEVSVSARNIRRLLSFQRYLRSSRFFRGTAVSNSLNILDDDYNGQAKCMLEKVGNWNFDIFLFDRLTNGNSLVSLTFHLFSLHGLIEYFHLDMMKLRRFLVMIQEDYHSQNPYHNAVHAADVTQAMHCYLKEPKLANSVTPWDILLSLIAAATHDLDHPGVNQPFLIKTNHYLATLYKNTSVLENHHWRSAVGLLRESGLFSHLPLESRQQMETQIGALILATDISRQNEYLSLFRSHLDRGDLCLEDTRHRHLVLQMALKCADICNPCRTWELSKQWSEKVTEEFFHQGDIEKKYHLGVSPLCDRHTESIAXIQIGNYTYLDIAG

SEQ ID NO: 209 - protein, 144 aa, Homo sapiens
ARAAGSLLGDGAVCSYRPIVDYIDAQFENYLQEELKIRRSLFDYHDTRIHVCLYFITPTGHSLKSLDLVTMKKLDSKVNIIPIIAKADTISKSEQTHSRHYELYRRCKLEEMGFQDSDGDSQPFSLQETSSAAHSGNSQSHSAL

SEQ ID NO: 210 - protein, 359 aa, Homo sapiens
TGGDVFVMLGEGGESRFDTNINFLLEEYGIMVNNDAVVRNVYHKYFHPKEALVSSGVLNREISRAAGKAVPGIIDEESSGNNAQALTFVYPFGATLSVMKPAVAVLSTGSVCFPLNRPILAFYHSKNQGGKLAVLGSCHMFSDQYLDKEENSKIMDVVFQWLTTGDIHLNQIDAEDPEISDYMMLPYTATLSKRNRECLQESDEIPRDFTTLFDLSIFQLDTTSFHSVIEAHEQLNVKHEPLQLIQPQFETPLPTLQPAVFPPSFRELPPPPLELFDLDETFSSEKARLAQITNKCTEEDLEFYVRKCGDILGVTSKLPKDQQDAKHILEHVFFQVVEFKKLNQEHDIDTSETAFQNNF

SEQ ID NO: 211 - protein, 604 aa, Homo sapiens
VCFQPLPKWGPCARMEIDGYSCFCVPGYQGRHCDLEVDECASDPCKNEATCLNEIGRYTCICPHNYSGVNCELEIDECWSQPCLNGATCQDALGAYFCDCAPGFLGDHCELNTDECASQPCLHGGLCVDGENRYSCNCTGSGFTGTHCETLMPLCWSKPCHNNATCEDSVDNYTCHCWPGYTGAQCEIDLNECNSNPCQSNGECVELSSEKQYGRITGLPSSFSYHEASGYVCICQPGFTGIHCEEDVNECSSNPCQNGGTCENLPGNYTCHCPFDNLSRTFYGGRDCSDILLGCTHQQCLNNGTCIPHFQDGQHGFSCLCPSGYTGSLCEIATTLSFEGDGFLWVKSGSVTTKGSVCNIALRFQTVQPMALLLFRSNRDVFVKLELLSGYIHLSIQVNNQSKVLLFISHNTSDGEWHFVEVIFAEAVTLTLIDDSCKEKCIAKAPTPLESDQSICAFQNSFLGGLPVGMTSNGVALLNFYNMPSTPSFVGCLQDIKIDWNHITLENISSGSSLNVKAGCVRKDWCESQPCQSRGRCINLWLSYQCDCHRPYEGPNCLRGERKLSAMARSAMPQSRAETAKTARLLLPAMKHNDPTRLLLLVAH

SEQ ID NO: 212 - protein, 251 aa, Homo sapiens
PRVRGLLCALLSLLAGHGWADTRAIGAEECRPNSQPWQAGLFHLTRLFCGATLISDRWLLTAAHCRKPYLWVRLGEHHLWKWEGPEQLFRVTDFFPHPGFNKDLSANDHNDDIMLIRLPRQARLSPAVQPLNLSQTCVSPGMQCLISGWGAVSSPKALFPVTLQCANISILENKLCHWAYPGHISDSMLCAGLWEGGRGSCQGDSGGPLVCNGTLAGVVSGGAEPCSRPRRPAVYTSVCHYLDWIQEIMEN

SEQ ID NO: 213 - protein, 293 aa, Homo sapiens
PRVRAVREKKIQSILNQKIRNLRALPINASSVQVNAMSSSTGELTVQASCGKRVVPLNVNRIASGVIAPKAAWPWQASLQYDNIHQCGATLISNTWLVTAAHCFQKYKNPHQWTVSFGTKINPPLMKRNVRRFIIHEKYRSAAREYDIAVVQVSSRVTFSDDIRRICLPEASASFQPNLTVHITGFGALYYGGESQNDLQEARVKIISDDVCKQPQVYGNDIKPGMFCAGYMEGIYDACRGDSGGPLVTRDLKDTWYLIGIVSWGDNCGQKDKPGVYTQVTYYRNWIASKTGI

SEQ ID NO: 214 - protein, 193 aa, Homo sapiens
YTNTGRLALEPALPTMALPVCPVHSREKHSLHCLPQWGAVREQAGFMTSQCSCTSLGKRMRQPPAFVLICACTTQSAFQGWPLSPLPWLTRVAITTEAGVAALAAAAAPVGATGPRVAEVHLGLAVVTREAGRAAAAQPSDGVDGPEEHGGGGDEGRGGVEAQHRHAAHVVLAGLPQADVVVEGQHALCRDSC

SEQ ID NO: 215 - protein, 146 aa, Homo sapiens
RQGRGRDGTENWRLGLFSASRSWLSFQASTVCTWSQERACAYSSVQLLKDVTELQILGEISFNKSLYEGLNAENHRTKITVVFLKDEKYHSLPIIIKGSVGGLLVLIVILVILFKCGFFKRKYQQLNLESIRKAQLKSENLLEEEN

SEQ ID NO: 216 - protein, 521 aa, Homo sapiens
  SITE (128): Xaa equals any of the naturally occurring L-amino acids
  SITE (234): Xaa equals any of the naturally occurring L-amino acids
PGTSDLLASQDLCGEALLLPWGDNLSSRLQGDREDHRASMDPDSDQPLNSLDVKPLRKPRIPIIIALLSLASIIIVVVLIKVILDKYYFLCGQPLHFIPRKQLCDGELDCPLGEDEEHCVKSFPEGPXVAVRLSKDRSTLQVLDSATGNWFSACFDNFTEALAETACRQMGYSSKPTFRAVEIGPDQDLDVVEITENSQELRMRNSSGPCLSGSLVSLHCLACGKSLKTPRVVXGEEASVDSWPWQVSIQYDKQHVCGGSILDPHWVLTAAHCFRKHTDVFNWKVRAGSDKLGSFPSLAVAKIIIIEFNPMYPKDNDIALMKLQFPLTFSGTVRPICLPFFDEELTPATPLWIIGWGFTKQNGGKMSDILLQASVQVIDSTRCNADDAYQGEVTEKMMCAGIPEGGVDTCQGDSGGPLMYQSDQWHVVGIVSWGYGCGGPSTPGVYTKVSAYLNWIYNVWKDRTIQRSCNSPGTGLVIQQPAVPLMELRSARHTHRLTTCVCFLSFPALQPLSPLCPFPWD

SEQ ID NO: 217 - protein, 158 aa, Homo sapiens
AFLVCTLSEWGCLYVCVSYVSSKCLGCVCFPTAQARPVWLEVTPRTPGGCGSQQRGQQQQRWGAVRGRALARVGAAAASLLAPQLLAEDARVCGRAQAAHVVVARPSVLAVQELVVADIRTNTGNTGDTGICSAFGDGEIGAWTPRSALIILLAFPLV

SEQ ID NO: 218 - protein, 287 aa, Homo sapiens
TRPARQVGLRRCLQAASGPEAPARARVHLQSQDTAAATMATPGLQQHQQPPGPGRHRWPPPPGGAAPAPVRGMTDSPPPAVGCVLSGLTGTLSPSRSCSVCTSPSSPPATGTGPAAPTAICQPPCRNGGSCVQPGRCRCPAGWRGDTCQSDVDECSARRGGCPQRCVNTAGSYWCQCWEGHSLSADGTLCVPKGGPPRVAPNPTGVDSAMKEEVQRLQSRVDLLEEKLQLVLAPLHSLASQALEHGLPDPGSLLVHSFQQLGRIDSLSEQISFLEEQLGSCSCKKDS

SEQ ID NO: 219 - protein, 331 aa, Homo sapiens
ALRHSRELPGLAGVGYPYHRNAGTIASSRPLLSAEPLWSCDSENQNFLCLLLAALTFLLCKAIQNTSTSLHLQLSLCLFLAHLLFLVGIDRTEPKVLCSIIAGALHYLYLAAFTWMLLEGVHLFLTARNLTVVNYSSINRLMKWIMFPVGYGVPAVTVAISAASWPHLYGTADRCWLHLDQGFMWSFLGPVCAIFSANLVLFILVFWILKRKLSSLNSEVSTIQNTRMLAFKATAQLFILGCTWCLGLLQVGPAAQVMAYLFTIINSLQGFFIFLVYCLLSQQVQKQYQKWFREIVKSKSESETYTLSSKMGPDSKPSEGDVFPGQVKRKY

SEQ ID NO: 220 - protein, 230 aa, Homo sapiens
PASPHLPHRLALPGAPAPDSPSPPLPGGVAAAGPPRRRPEQQQQQQEPASMMKFKPNQTRTYDREGFKKRAACLCFRSEQEDEVLLVSSSRYPDQWIVPGGGMEPEEEPGGAAVREVYEEAGVKGKLGRLLGIFENQDRKHRTYVYVLTVTEILEDWEDSVNIGRKREWFKVEDAIKVLQCHKPVHAEYLEKLKLGCSPANGNSTVPSLPDNNALFVTAAQTSGLPSSVR

SEQ ID NO: 221 - protein, 479 aa, Homo sapiens
  SITE (459): Xaa equals any of the naturally occurring L-amino acids
LLASPALPVLRLCRPHSRPRPIFLRDSRPLVPPSSSRVLPAPSSCSRRLLGTQAGRRRAQPSKREQPWLRELQRSRVSDGARLRRCGTRSFPGSEEVLSSMARRSAFPAAALWLWSILLCLLALRAEAGPPQEESLYLWIDAHQARVLIGFEEDILIVSEGKMAPFTHDFRKAQQRMPAIPVNIHSMNFTWQAAGQAEYFYEFLSLRSLDKGIMADPTVNVPLLGTVPHKASVVQVGFPCLGKQDGVAAFEVDVIVMNSEGNTILQTPQNAIFFKTCQQAECPGGCRNGGFCNERRICECPDGFHGPHCEKALCTPRCMNGGLCVTPGFCICPPGFYGVNCDKANCSTTCFNGGTCFYPGKCICPPGLEGEQCEISKCPQPCRNGGKCIGKSKCKCSKGYQGDLCSKPVCEPGCGAHGTCHEPNKCQCQEGWHGRHCNKRYEASLIHALRPAGAQLRQXTPSLKKAEERRDPPESNYIW

SEQ ID NO: 222 - protein, 100 aa, Homo sapiens
AEWEQMPSSYVQGLCRSHHTTLLMMTPSSSISHWTSSPFCNRAGHDSVSPSVRHTYTSLYFSSLRQACQAFGALALCFSLTYLEKDRRFPEYTDTWGGPS

SEQ ID NO: 223 - protein, 131 aa, Homo sapiens
  SITE (125): Xaa equals any of the naturally occurring L-amino acids
NFAGLNGSRTATRSDIAGVCGWLLLSGPCGVGLDLDSRLLGASAMRRSEVLAEESIVCLQKALNHLREIWELIGIPEDQRLQRTEVVKKHIKELLDMMIAEEESLKERLIKSISVCQKELNTLCXELLLSH

SEQ ID NO: 224 - protein, 661 aa, Homo sapiens
LAWDTRTTEMQGPLLLPGLCFLLSLFGAVTQKTKTSCAKCPPNASCVNNTHCTCNHGYTSGSGQKLFTFPLETCNDINECTPPYSVYCGFNAVCYNVEGSFYCQCVPGYRLHSGNEQFSNSNENTCQDTTSSKTTQGRKELQKIVDKFESLLTNQTLWRTEGRQEISSTATTILRDVESKVLETALKDPEQKVLKIQNDSVAIETQAITDNCSEERKTFNLNVQMNSMDIRCSDIIQGDTQGPSAIAFISYSSLGNIINATFFEEMDKKDQVYLNSQVVSAAIGPKRNVSLSKSVTLTFQHVKMTPSTKKVFCVYWKSTGQGSQWSRDGCFLIHVNKSHTMCNCSHLSSFAVLMALTSQEEDPVLTVITYVGLSVSLLCLLLAALTFLLCKAIQNTSTSLHLQLSLCLFLAHLLFLVGIDRTEPKVLCSIIAGALHYLYLAAFTWMLLEGVHLFLTARNLTVVNYSSINRLMKWIMFPVGYGVPAVTVAISAASWPHLYGTADRCWLHLDQGFMWSFLGPVCAIFSANLVLFILVFWILKRKLSSLNSEVSTIQNTRMLAFKATAQLFILGCTWCLGLLQVGPAAQVMAYLFTIINSLQGFFIFLVYCLLSQQVQKQYQKWFREIVKSKSESETYTLSSKMGPDSKPSEGDVFPGQVKRKY

SEQ ID NO: 225 - protein, 478 aa, Homo sapiens
HEGNWGCYTEQQRCDGYWHCPNGRDETNCTMCQKEEFPCSRNGVCYPRSDRCNYQNHCPNGSDEKNCFFCQPGNFHCKNNRCVFESWVCDSQDDCGDGSDEENCPVIVPTRVITAAVIGSLICGLLLVIALGCTCKLYSLRMFERRSFETQLSRVEAELLRREAPPSYGQLIAQGLIPPVEDFPVCSPNQASVLENLRLAVRSQLGFTSVRLPMAGRSSNIWNRIFNFARSRHSGSLALVSADGDEVVPSQSTSREPERNHTHRSLFSVESDDTDTENERRDMAGASGGVAAPLPQKVPPTTAVEATVGACASSSTQSTRGGHADNGRDVTSVEPPSVSPARHQLTSALSRMTQGLRWVRFTLGRSSSLSQNQSPLRQLDNGVSGREDDDDVEMLIPISDGSSDFDVNDCSRPLLDLASDQGQGLRQPYNATNPGVRPSNRDGPCERCGIVHTAQIPDTCLEVTLKNETSDDEALLLC

SEQ ID NO: 226 - protein, 362 aa, Homo sapiens
APPAPSSQAPPCRPRPSCRPRPGMASLRWCAQPTPPGCSCGTGAASVCHPADIDECMLFGSEICKEGKCVNTQPGYECYCKQGFYYDGNLLECVDVDECLDESNCRNGVCENTRGGYRCACTPPAEYSPAQRQCLSPEEMDVDECQDPAACRPGRCVNLPGSYRCECRPPWVPGPSGRDCQLPESPAERAPERRDVCWSQRGEDGMCAGPLAGPALTFDDCCCRQGRGWGAQCRPCPPRGAGSHCPTSQSESNSFWDTSPLLLGKPPRDEDSSEEDSDECRCVSGRCVPRPGGAVCECPGGFQLDASRARCVDIDECRELNQRGLLCKSERCVNTSGSFRCVCKAGFARSRPHGACVPQRRR

SEQ ID NO: 227 - protein, 225 aa, Homo sapiens
  SITE (172): Xaa equals any of the naturally occurring L-amino acids
  SITE (177): Xaa equals any of the naturally occurring L-amino acids
  SITE (178): Xaa equals any of the naturally occurring L-amino acids
  SITE (189): Xaa equals any of the naturally occurring L-amino acids
  SITE (190): Xaa equals any of the naturally occurring L-amino acids
  SITE (195): Xaa equals any of the naturally occurring L-amino acids
  SITE (196): Xaa equals any of the naturally occurring L-amino acids
  SITE (199): Xaa equals any of the naturally occurring L-amino acids
  SITE (214): Xaa equals any of the naturally occurring L-amino acids
GRPTRPLIARCDGVSDCKDGEDEYRCVRVGGQNAVLQVFTAASWKTMCSDDWKGHYANVACAQLGFPSYVSSDNLRVSSLEGQFREEFVSIDHLLPDDKVTALHHSVYVREGCASGHVVTLQCTACGHRRGYSSRIVGGNMSLLSQWPWQASLQFQGYHLCGGSVITPLWIXTAAHXXYDLYLPKSWTXXVGLVXXWTXQPHSTWWRRLSTTAXTSQKAGNDIAL

SEQ ID NO: 228 - protein, 172 aa, Homo sapiens
  SITE (1): Xaa equals any of the naturally occurring L-amino acids
  SITE (2): Xaa equals any of the naturally occurring L-amino acids
XXQKLELHRGGGRSRTSGSPGLQEFGTRELQHSIPLGPNVLPVCLPDNETLYRSGLLGYVSGFGMEMGWLTTELKYSRLPVAPREACNAWLQKRQRPEVFSDNMFCVGDETQRHSVCQGDSGSVYVVWDNHAHHWVATGIVSWGIGCGEGYDFYTKVLSYVDWIKGVMNGKN

SEQ ID NO: 229 - protein, 153 aa, Homo sapiens; identical to SEQ ID NO: 155

SEQ ID NO: 230 - protein, 46 aa, Homo sapiens
  SITE (42): Xaa equals any of the naturally occurring L-amino acids
PFEKQEGMDPRGEEEGLALEERCPLREEKEEKVGLDTKSVGXLLGN

SEQ ID NO: 231 - protein, 36 aa, Homo sapiens
  SITE (27): Xaa equals any of the naturally occurring L-amino acids
TLQLPVRGLIIIILILQRRKLRHKEIXWLNSLPNVT

SEQ ID NO: 232 - protein, 84 aa, Homo sapiens
  SITE (28): Xaa equals any of the naturally occurring L-amino acids
  SITE (33): Xaa equals any of the naturally occurring L-amino acids
KMHCQPRIIHPGRPSLKNEGEIKAFSGXPKAYXGTSRPAQRIFSGRRELTPEGNFGNTGLWTLFNRDYKIRGVQHFDVVHRPRG

SEQ ID NO: 233 - protein, 74 aa, Homo sapiens
  SITE (37): Xaa equals any of the naturally occurring L-amino acids
LWDTQSDGAGWSEDIEPWCVWNFHRGKPGAREARKRXRRTEGLYRCHCAEGGYEGGRCMGEGECSVAGGLGKGE

SEQ ID NO: 234 - protein, 64 aa, Homo sapiens
GRPALKRCFRKSGWPQNETETGGEPGEGGVPETKEESTFVWHLFLTFVIVMEGLQNIYKTKACV

SEQ ID NO: 235 - protein, 93 aa, Homo sapiens
  SITE (6): Xaa equals any of the naturally occurring L-amino acids
  SITE (7): Xaa equals any of the naturally occurring L-amino acids
YPVILXXCCLFCFLFWEATLMHTVFIFFMQPDWLDQNQDLNSRVIREFMEEKSLGMLGTWVESCPSRTFSSLLLAQCLLPSKASPLGRRCGNR

SEQ ID NO: 236 - protein, 140 aa, Homo sapiens
  SITE (105): Xaa equals any of the naturally occurring L-amino acids
  SITE (110): Xaa equals any of the naturally occurring L-amino acids
GTSGDRCQYYVCHHYCVNSESCTIGDDGSVECVCPTRYEGPKCEVDKCVRCHGGHCIINKDSEDIFCNCTNGKIASSCQLCDGYCYNGGTCQLDPETNVPVCLCXTNWSXTQCERPAPKSSKLIISAQEALPSLCLSSSW

SEQ ID NO: 237 - protein, 72 aa, Homo sapiens
EMTWIKKEIEKIRDERHSICWTFLATVLLVHPSKKKEKSNQQGGTREHKEEIRIFFYMYSAFLSLLWCYYHQ

SEQ ID NO: 238 - protein, 221 aa, Homo sapiens
  SITE (102): Xaa equals any of the naturally occurring L-amino acids
WQNVADFRDAGGSLTEVKVEEEERDPQSPEFEIEEEEEMLSSVIPDSRRENELPDFPHIDEFFTLNSTPSRSAYDEPHLLVNIEKQKLELEKRRLDIEAETXQVEKERLQIEKERLRHLDMEHERLQLEKERLQIEREKLRLQIVNSEKPSLENELGQGEKSMLQPQDIETEKLKLERERLQLEKDRLQFLKFESEKLQIEKERLQVEKDRLRIQKEGHLQ

SEQ ID NO: 239 - protein, 74 aa, Homo sapiens
FSKICIKCINYKSELSGEVLQQQRDQYDFHWEETGILPTHRKAKVDPLNLVIVILKLVSVAGKLYVCVCQLSIF

SEQ ID NO: 240 - protein, 58 aa, Homo sapiens
ELDCLGLLCVFEVEEEMGIFFFSSRSQWKNSSLAKEWTYLCFKIFYTYKNLEMERELF

SEQ ID NO: 241 - protein, 221 aa, Homo sapiens
MAASRPLSRFWEWGKNIVCVGRNYADHVREMRSAVLSEPVLFLKPSTAYAPEGSPILMPAYTRNLHHELELGVVMGKRCRAVPEAAAMDYVGGYALCLDMTARDVQDECKKKGLPWTLAKSFTASCPVSAFVPKEKIPDPHKLKLWLKVNGELRQEGETSSMIFSIPYIISYVSKIITLEEGDIILTGTPKGVGPVKENDEIEAGIHGLVSMTFKVEKPEY

SEQ ID NO: 242 - protein, 123 aa, Homo sapiens
  SITE (88): Xaa equals any of the naturally occurring L-amino acids
GHELVPLHFSHTVDSLKPGFKDSPKCSQAGRIHSEFGVEFSQINQPDSNCTLSIANRLYGTKTMAFHQQYLSCSEKWYQARLQTVDFXQSTEETRKTINAWVEIKLMEKSQISLERAQLTLHL

SEQ ID NO: 243 - protein, 218 aa, Homo sapiens
GDGVSAKMSTAAVPELKQISRVEAMRLGPGWSHSCHAMLYAANPGQLFGRIPMRFSVLMQMRFDGLLGFPGGFVDRRFWSLEDGLNRVLGLGLGCLRLTEADYLSSHLTEGPHRVVAHLYARQLTLEQLHAVEISAVHSRDHGLEVLGLVRVPLYTQKDRVGGFPNFLSNAFVSTAKCQLLFALKVLNMMPEEKLVEALAAATEKQKKALEKLLPASS

SEQ ID NO: 244 - protein, 30 aa, Homo sapiens
  SITE (27): Xaa equals any of the naturally occurring L-amino acids
LFFVIRRRLKISKFYRYLWPQNIIDMXSYL

SEQ ID NO: 245 - protein, 125 aa, Homo sapiens
  SITE (49): Xaa equals any of the naturally occurring L-amino acids
  SITE (114): Xaa equals any of the naturally occurring L-amino acids
  SITE (115): Xaa equals any of the naturally occurring L-amino acids
  SITE (119): Xaa equals any of the naturally occurring L-amino acids
KAEGPATGAEGHDFSLFKLSDTEMRVKISPQLLLATHRFMATEVEPFKXLYLSEKILLRLLKHPNVIQELKFDEKNKKAPEHYLYQRNRPVDYFVLLLQGKVEVEVGKEGLRFXXGAFXYYGVPA

SEQ ID NO: 246 - protein, 40 aa, Homo sapiens; identical to SEQ ID NO: 173

SEQ ID NO: 247 - protein, 135 aa, Homo sapiens
  SITE (39): Xaa equals any of the naturally occurring L-amino acids
  SITE (120): Xaa equals any of the naturally occurring L-amino acids
  SITE (131): Xaa equals any of the naturally occurring L-amino acids
GSTHASGEREIVMAAAILAEKVPVDSAEEREQPLASARXLAAQKREQRLRKFRELHLKRNEARKLNHQEVVEEDKRLKLPANWEARKARLEWELQEEEKKKECAARREDYEKVNCWSSWXKMQKVGRGRRXGKTP

SEQ ID NO: 248 - protein, 72 aa, Homo sapiens
CQVIEANYHSSNAYHNSTHAADVLHATAFFLGKERVKGSLDQLDEVAALIAATVHDVDHPGRTNSFLLQCRQ

SEQ ID NO: 249 - protein, 87 aa, Homo sapiens
IPLKATCEPGCKFGECVGPNKCRCFPGYTGKTCSQGYLTMTGDNFGCHNWMWEVLPASSEWSPGMPLNILQCTGQSPQQIMICVNGS

SEQ ID NO: 250 - protein, 82 aa, Homo sapiens
  SITE (14): Xaa equals any of the naturally occurring L-amino acids
IICVGNNYPKHIKXWATHARRAMLFNKPETALCDLRQPLAIPSDFGSVHHEVELAVLIGATCVRLRKSMSAKPLPVMAWRSI

SEQ ID NO: 251 - protein, 172 aa, Homo sapiens
  SITE (160): Xaa equals any of the naturally occurring L-amino acids
DNHTMRGTPGDADGGGRAVYQSMCKPITGTINDLNQQVWTLQGQNLVAVPRSDSVTPVTVAVITCKYPEALEQGRGDPIYLGIQNPEMCLYCEKVGEQPTLQLKEQKIMDLYGQPEPVKPFLFYRAKTGRTSTLESVAFPDWFIASSKRDQPIILTSELXKSYNTAFELNIN

SEQ ID NO: 252 - protein, 238 aa, Homo sapiens
  SITE (5): Xaa equals any of the naturally occurring L-amino acids
SMTSXPEVNVENAAHPCVRAPCAHGGSCRPRKEGYDCDCPLGFEGLHCQKAIIEAIEIPQFIGRSYLTYDNPDILKRVSGSRSNVFMRFKTTAKDGLLLWRGDSPMRPNSDFISLGLRDGALVFSYNLGSGVASIMVNGSFNDGRWHRVKAVRDGQSGKITVDDYGARTGKSPGMMRQLNINGALYVGGMKEIALHTNRQYMRGLVGCISHFTLSTDYHISLVEDAVDGKNINTCGAK

SEQ ID NO: 253 - protein, 229 aa, Homo sapiens
  SITE (221): Xaa equals any of the naturally occurring L-amino acids
ATKINLSLSALGNVISALVDGKSTHIPYRDSKLTRLLQDSLGGNAKTVMVANVGPASYNVEETLTTLRYANRAKNIKNKPRVNEDPKDALLREFQEEIARLKAQLEKRSIGRRKRREKRREGGGSGGGGEEEEEEGEEGEEEGDDKDDYWREQQEKLEIEKRAIVEDHSLVAEEKMRLLKEKEKKMEDLRREKDAAEMLGAKIKVPYPYPSLGPCPVTAFXFIKQQQKT

SEQ ID NO: 254 - protein, 156 aa, Homo sapiens
  SITE (119): Xaa equals any of the naturally occurring L-amino acids
  SITE (120): Xaa equals any of the naturally occurring L-amino acids
  SITE (133): Xaa equals any of the naturally occurring L-amino acids
  SITE (142): Xaa equals any of the naturally occurring L-amino acids
  SITE (156): Xaa equals any of the naturally occurring L-amino acids
PQSLALQQSTSPASRSLGTSPSPQTTVVSTAEDLAPKSATFAVQSSTQSPTTLSSSASVNSCAVNPCLHNGECVADNTSRGYHCRCPPSWQGDDCSVDVNECLSNPCPSTATCNNTQGXXICKCPVGYQLEKXICNLGKRLXLFRTLFRTTIYFTX

SEQ ID NO: 255 - protein, 110 aa, Homo sapiens
  SITE (35): Xaa equals any of the naturally occurring L-amino acids
  SITE (38): Xaa equals any of the naturally occurring L-amino acids
  SITE (57): Xaa equals any of the naturally occurring L-amino acids
  SITE (60): Xaa equals any of the naturally occurring L-amino acids
  SITE (63): Xaa equals any of the naturally occurring L-amino acids
  SITE (78): Xaa equals any of the naturally occurring L-amino acids
HAEFLCLLNPSGATCVCPEGKYLINGTCNDDSLLXDSXKLTCENGGRCILNEKGDLXCHXWPXYSGERCEVNHCSNYXQNGGTCVPSVLGRPTCSCALGFTGPNCGKDSL

SEQ ID NO: 256 - protein, 286 aa, Homo sapiens
  SITE (32): Xaa equals any of the naturally occurring L-amino acids
  SITE (35): Xaa equals any of the naturally occurring L-amino acids
  SITE (42): Xaa equals any of the naturally occurring L-amino acids
  SITE (104): Xaa equals any of the naturally occurring L-amino acids
SARAARGGSGFIMSEAGLIITNAHVVSSNSAXPGXQQLKVQXQNGDSYEATIKDIDKKSDIATIKIHPKKKLPVLLLGHSADLRPGEFVVAIGSPFALQNTVTXGIVSTAQREGRELGLRDSDMDYIQTDAIINYGNSGGPLVNLDGEVIGINTLKVTAGISFAIPSDRITRFLTEFQDKQIKDWKKRFIGIRMRTITPSLVDELKASNPDFPEVSSGIYVQEVAPNSPSQRGGIQDGDIIVKVNGRPLVDSSELQEAVLTESPLLLEVRRGNDDLLFSIAPEVVM

SEQ ID NO: 257 - protein, 148 aa, Homo sapiens
  SITE (2): Xaa equals any of the naturally occurring L-amino acids
GXLVRLQVPVRNSRVDPRVRAPSPSFGALCSPLFATMRLLSSRAARVSGPSGSLCALLALLLLTPPGPLASAGPVAAVVRELRCVCLTTTPGIHPKTVSDLQVIAAGPQCSKVEVIATLKNGREVCLDPEAPLIKKIVQKILDSGKNN

SEQ ID NO: 258 - protein, 132 aa, Homo sapiens
PRVRAPSPSFGALCSPLFATMRLLSSRAARVSGPSGSLCALLALLLLTPPGPLASAGPVAAVVRELRCVCLTTTPGIHPKTVSDLQVIAAGPQCSKVEVIATLKNGREVCLDPEAPLIKKIVQKILDSGKNN

SEQ ID NO: 259 - protein, 122 aa, Homo sapiens
DWTRSSPQWLGLRRGMGFFSKETPFSSTLVPAQETPRSFECTCPRGFYGLRCEVSGVTCADGPCFNGGLCVGGADPDSAYICHCPPGFQGSNCEKRVDRCSLQPCRNGEGWSLNGEGWGWGS

SEQ ID NO: 260 - protein, 109 aa, Homo sapiens
RRRRRLREEARGAMTSASTKVGEIFSAAGAAFTKLGELTMQLHPVADSSPAGAQIKATVKRKVYEDSGIPLPAESPKKGPKKVASGVLSPPPAAPPPSSSSVPEAGGPP

SEQ ID NO: 261 - protein, 315 aa, Homo sapiens
  SITE (224): Xaa equals any of the naturally occurring L-amino acids
  SITE (229): Xaa equals any of the naturally occurring L-amino acids
  SITE (289): Xaa equals any of the naturally occurring L-amino acids
  SITE (315): Xaa equals any of the naturally occurring L-amino acids
GWSRVSCRCTEGFRLAADGRSCEDPCAQAPCEQQCEPGGPQGYSCHCRLGFRPAEDDPHRCVDTDECQIAGVCQQMCVNYVGGFECYCSEGHELEADGISCSPAGAMGAQASQDLGDELLDDGEDEEDEDEAWKAFNGGWTEMPGILWMEPTQPPDFALAYRPSFPEDREPQIPYHSSVLSVTRPVVVSATRPTLPSAHQPPVILATQPVLSRDHQIPVIAANXPDLPXAYQPGILSVSHSAQPPAHQPPMISTKYPELFPAHQSPMFPDTRPVVVSATRPTLPSANVXLFGGPACTGHRGLYPLWPPCTQQAHX

SEQ ID NO: 262 - protein, 188 aa, Homo sapiens
  SITE (97): Xaa equals any of the naturally occurring L-amino acids
  SITE (187): Xaa equals any of the naturally occurring L-amino acids
  SITE (188): Xaa equals any of the naturally occurring L-amino acids
NECIPHNGCRHGTCSTPWQCTCDEGWGGLFCDQDLNYCTHHSPCKNGATCSNSGQRSYTCTCRPGYTGVDCELELSECDSNPCRNGGSCKDQEDGYXCLCPPGYYGLHCEHSTLSCADSPCFNGGSCRERNQGANYACECPPNFTGSNCEKKVDRCTSNPCANGGQCLNRGPSRMCRCRLDSRHLLXX

SEQ ID NO: 263 - protein, 74 aa, Homo sapiens
  SITE (1): Xaa equals any of the naturally occurring L-amino acids
XLGIEIINYFLISLLSSGERIGLEQALQCRDGYEPCVNEGMCVTYHNGTGYCKCPEGFLGEYCQHRDPCEKNRC

SEQ ID NO: 264 - protein, 183 aa, Homo sapiens
  SITE (153): Xaa equals any of the naturally occurring L-amino acids
TPFLKHFCSPLPESLRMLPGCIFLMILLIPQVKEKFILGVEGQQLVRPKKLPLIQKRDTGHTHDDDILKTYEEELLYEIKLNRKTLVLHLLRSREFLGSNYSETFYSMKGEAFTRHPQIMDHCFYQGSIVHEYDSAASISTCNGLRGFFRINXQRYLIEPVKYSDEGEHLVFKYNLRVPYGAN

SEQ ID NO: 265 - protein, 186 aa, Homo sapiens
  SITE (9): Xaa equals any of the naturally occurring L-amino acids
RPRDGVVSXSLPAAARRVLPRAMTASAQPRGRRPGVGVGVVVTSCKHPRCVLLGKRKGSVGAGSFQLPGGHLEFGETWEECAQRETWEEAALHLKNVHFASVVNSFIEKENYHYVTILMKGEVDVTHDSEPKNVEPEKNESWEWVPWEELPPLDQLFWGLRCLKEQGYDPFKEDLNHLVGYKGNHL

SEQ ID NO: 266 - protein, 226 aa, Homo sapiens
  SITE (133): Xaa equals any of the naturally occurring L-amino acids
CVDGVAGYRCTCVKGFVGLHCETEVNECQSNPCLNNAVCEDQVGGFMCKCPPGFLGTRCGKNVDECLSQPCKNGATCKDGANSFRCLCAAGFTGSHCELNINECQSNPCRNQATCVDELNSYSCKCQPGFSGXRCETEQSTGFNLDFEVSGIYGYVMLDGMLPSLHALTCTFWMKSSDDMNYGTPISYAVDNGSDNTLLLTDYNGWVLYVNGREKITNCPSVNDGR

SEQ ID NO: 267 - protein, 196 aa, Homo sapiens; identical to SEQ ID NO: 194
  SITE (1): Xaa equals any of the naturally occurring L-amino acids
  SITE (4): Xaa equals any of the naturally occurring L-amino acids

SEQ ID NO: 268 - protein, 180 aa, Homo sapiens
  SITE (9): Xaa equals any of the naturally occurring L-amino acids
  SITE (19): Xaa equals any of the naturally occurring L-amino acids
  SITE (38): Xaa equals any of the naturally occurring L-amino acids
PGGTRATSXSQAASATRLXQDVVHTALRETREELGLAXPEEHVWGLLRPVYDPQKATVVPVLAGVGPLDPQSLRPNSEEVDEVFALPLAHLLQTQNQGYTHFCRGGHFRYTLPVFLHGPHRVWGLTAVITEFALQLLAPGTYQPRLAGLTCSGAEGLARPKQPLASPCQASSTPGLNKGL

SEQ ID NO: 269 - protein, 229 aa, Homo sapiens
  SITE (2): Xaa equals any of the naturally occurring L-amino acids
  SITE (3): Xaa equals any of the naturally occurring L-amino acids
EXXKPKMTWRHHVRLLFTVSLALQIINLGNSYQREKHNGGRGEVTKVATQKHRQSPLNWTSSHFGEVTGSAEGWGPEEPLPYSRAFGEGASARPRCCRNGGTCVLGSFCVCPAHFTGRYCEHDQRRSECGALEHGAWTLRACHLCRCIFGALHCLPLQTPDRCDPKDFLASHAHGPSAGGAPSLLLLLPCALLHRLLRPDAPAHPRSLVPSVLQRERRPCGRPGLGHRL

SEQ ID NO: 270 - protein, 201 aa, Homo sapiens
RPLEINPTKGNKSWSSTAVAAALELVDPPGCRNSARDGGPDRAQVLPRVDAAARRGGLLSAECSAGLCFHGGRCVPGSAQPCHCPPGFQGPRCQYDVDECRTHNGGCQHRCVNTPGSYLCECKPGFRLHTDSRTCLAINSCALGNGGCQHHCVQLTITRHRCQCRPGFQLQEDGRHCVRECCSLGGRTWGWRQDKLPRLAC

SEQ ID NO: 271 - protein, 59 aa, Homo sapiens
  SITE (5): Xaa equals any of the naturally occurring L-amino acids
  SITE (59): Xaa equals any of the naturally occurring L-amino acids
IGAAXIGLLGLVARSGHWCLSISAPVLTDSILPSQQLQKRIEVAIDGFKASPEVPKAPX

SEQ ID NO: 272 - protein, 800 aa, Homo sapiens
  SITE (197): Xaa equals any of the naturally occurring L-amino acids
  SITE (201): Xaa equals any of the naturally occurring L-amino acids
  SITE (687): Xaa equals any of the naturally occurring L-amino acids
WIPRAAGIRHEGAWSAWQPWGTCSESCGKGTQTRARLCNNPPPAFGGSYCDGAETQMQVCNERNCPIHGKWATWASWSACSVSCGGGARQRTRGCSDPVPQYGGRKCEGSDVQSDFCNSDPCPTHGNWSPWSGWGTCSRTCNGGQMRRYRTCDNPPPSNGGRACGGPDSQIQRCNTDMCPVDGSWGSWHSWSQCSAXCGGXEKTRKRLCDHPVPVKGGRPCPGDTTQVTRCNVQACPGGPQRARGSVIGNINDVEFGIAFLNATITDSPNSDTRIIRAKITNVPRSLGSAMRKIVSILNPIYWTTAKEIGEAVNGFTLTNAVFKRETQVEFATGEILQMSHIARGLDSDGSLLLDIVVSGYVLQLQSPAEVTVKDYTEDYIQTGPGQLYAYSTRLFTIDGISIPYTWNHTVFYDQAQGRMPFLVETLHASSVESDYNQIEETLGFKIHASISKGDRSNQCPSGFTLDSVGPFCADEDECAAGNPCSHSCHNAMGTYYCSCPKGLTIAADGRTCQDIDECALGRHTCHAGQDCDNTIGSYRCVVRCGSGFRRTSDGLSCQDINECQESSPCHQRCFNAIGSFHCGCEPGYQLKGRKCMDVNECRQNVCRPDQHCKNTRGGYKCIDLCPNGMTKAENGTCIDIDECKDGTHQCRYNQICENTRGSYRCVCPRGYRSQGVGRPCMDINEXEQVPKPCAHQCSNTPGSFKCICPPGQHLLGDGKSCAGLERLPNYGTQYSSYNLARFSPVRNNYQPQQHYRQYSHLYSSYSEYRNSRTSLSRTRRTIRKTCPEALRQAMTMCRY

SEQ ID NO: 273 - protein, 54 aa, Homo sapiens
LTKDRTEKTTKAIEVSSPLPDVLNATEPLSTAQREIQRQSTLQLLRKVLQIPEN

SEQ ID NO: 274 - protein, 84 aa, Homo sapiens
  SITE (40): Xaa equals any of the naturally occurring L-amino acids
FPGNRKMGGRPASLAPRSAQLNSKRYLILIYSVEFDRIHXPLPLPYQGKPDPVVLQGIIRSLKEELGRLQGWMARNTRGHPGRM

SEQ ID NO: 275 - protein, 396 aa, Homo sapiens
  SITE (85): Xaa equals any of the naturally occurring L-amino acids
  SITE (372): Xaa equals any of the naturally occurring L-amino acids
  SITE (379): Xaa equals any of the naturally occurring L-amino acids
  SITE (383): Xaa equals any of the naturally occurring L-amino acids
  SITE (391): Xaa equals any of the naturally occurring L-amino acids
LLQDSLGGNAKTVMVANVGPASYNVEETLTTLRYANRAKNIKNKPRVNEDPKDALLREFQEEGEEEGDDKDDYWREQQEKLEIEXRAIVEDHSLVAEEKMRLLKEKEKKMEDLRREKDAAEMLGAKIKAMESKLLVGGKNIVDHTNEQQKILEQKRQEIAEQKRREREIQQQMESRDEETLELKETYSSLQQEVDIKTKKLKKLFSKLQAVKAEIHDLQEEHIKERQELEQTQNELTRELKLKHLIIENFIPLEEKSKIMNRAFFDEEEDHWKLHPITRLENQQMMKRPVSAVGYKRPLSQHARMSMMIRPEARYRAENIVLLELDMPSRTTRDYEGPAIAPKVQAALDAALQDEDEIQVDASSFESTANKXSKARLKXGRKXRRRRERGXRRKGC

SEQ ID NO: 276 - protein, 497 aa, Homo sapiens
  SITE (495): Xaa equals any of the naturally occurring L-amino acids
  SITE (497): Xaa equals any of the naturally occurring L-amino acids
ARGVPVECPQPEKIPNGIIDVQGLAYLSTALYTCKPGFELVGNTTTLCGENGHWLGGKPTCKAIECLKPKEILNGKFSYTDLHYGQTVTYSCNRGFRLEGPSALTCLETGDWDVDAPSCNAIHCDSPQPIENGFVEGADYSYGAIIIYSCFPGFQVAGHAMQTCEESGWSSSIPTCMPIDCGLPPHIDFGDCTKLKDDQGYFEQEDDMMEVPYVTPHPPYHLGAVAKTWENTKESPATHSSNFLYGTMVSYTCNPGYELLGNPVLICQEDGTWNGSAPSCISIECDLPTAPENGFLRFTETSMGSAVQYSCKPGHILAGSDLRLCLENRKWSGASPRCEAISCKKPNPVMNGSIKGSNYTYLSTLYYECDPGYVLNGTERRTCQDDKNWDEDEPICIPVDCSSPPVSANGQVRGDEYTFQKEIEYTCNEGFLLEGARSRVCLANGSWSGATPDCVPVRCATPPQLANGVTEGLDYGFMKEVTFHCHEGYILHGAXKX

SEQ ID NO: 277 - protein, 115 aa, Homo sapiens
  SITE (18): Xaa equals any of the naturally occurring L-amino acids
  SITE (70): Xaa equals any of the naturally occurring L-amino acids
  SITE (82): Xaa equals any of the naturally occurring L-amino acids
  SITE (113): Xaa equals any of the naturally occurring L-amino acids
TSRACWADARRGGAAAPXVGDTLTVLVCDGFEASTDAALEVSPGVIANPFAAGIGHRNSLESISSIDREXSPEGPGKEKELXGQTLHWGPEATEAVVRGLQALEVGLTGPWPXCP

SEQ ID NO: 278 - protein, 325 aa, Homo sapiens
TRPPAPPAMVVSGAPPALGGGCLGTFTSLLLLASTAILNAARIPVPPACGKPQQLNRVVGGEDSTDSEWPWIVSIQKNGTHHCAGSLLTSRWVITAAHCFKDNLNKPYLFSVLLGAWQLGNPGSRSQKVGVAWVEPHPVYSWKEGACADIALVRLERSIQFSERVLPICLPDASIHLPPNTHCWISGWGSIQDGVPLPHPQTLQKLKVPIIDSEVCSHLYWRGAGQGPITEDMLCAGYLEGERDACLGDSGGPLMCQVDGAWLLAGIISWGEGCAERNRPGVYISLSAHRSWVEKIVQGVQLRGRAQGGGALRAPSQGSGAAARS

SEQ ID NO: 279 - protein, 322 aa, Homo sapiens
  SITE (73): Xaa equals any of the naturally occurring L-amino acids
PAPPAMVVSGAPPALGGGCLGTFTSLLLLASTAILNAARIPVPPACGKPQQLNRVVGGEDSTDSEWPWIVSIXKNGTHHCAGSLLTSRWVITAAHCFKDNLNKPYLFSVLLGAWQLGNPGSRSQKVGVAWVEPHPVYSWKEGACADIALVRLERSIQFSERVLPICLPDASIHLPPNTHCWISGWGSIQDGVPLPHPQTLQKLKVPIIDSEVCSHLYWRGAGQGPITEDMLCAGYLEGERDACLGDSGGPLMCQVDGAWLLAGIISWGEGCAERNRPGVYISLSAHRSWVEKIVQGVQLRGRAQGGGALRAPSQGSGAAARS

SEQ ID NO: 280 - protein, 211 aa, Homo sapiens
  SITE (198): Xaa equals any of the naturally occurring L-amino acids
RIHAADVTQAMHCYLKEPKLANSVTPWDILLSLIAAATHDLDHPGVNQPFLIKTNHYLATLYKNTSVLENHHWRSAVGLLRESGLFSHLPLESRQQMETQIGALILATDISRQNEYLSLFRSHLDRGDLCLEDTRHRHLVLQMALKCADICNPCRTWELSKQWSEKVTEEFFHQGDIEKKYHLGVSPLCDRHTESIAXIQIGNYTYLDIAG

SEQ ID NO: 281 - protein, 336 aa, Homo sapiens
  SITE (126): Xaa equals any of the naturally occurring L-amino acids
  SITE (168): Xaa equals any of the naturally occurring L-amino acids
  SITE (186): Xaa equals any of the naturally occurring L-amino acids
  SITE (299): Xaa equals any of the naturally occurring L-amino acids
  SITE (318): Xaa equals any of the naturally occurring L-amino acids
  SITE (329): Xaa equals any of the naturally occurring L-amino acids
AGSLLGDGAVCSYRPIVDYIDAQFENYLQEELKIRRSLFDYHDTRIHVCLYFITPTGHSLKSLDLVTMKKLDSKVNIIPIIAKADTISKSELHKFKIKIMGELVSNGVQIYQFPTDDEAVAEINAXMNAHLPFAVVGSTEEVKVGNKLVRARQYPWGVVQVENENHCXFVKLREMLIRVNMEDLRXQTHSRHYELYRRCKLEEMGFQDSDGDSQPFSLQETYEAKRKEFLSELQRKEEEMRQMFVNKVKETELELKEKERELHEKFEHLKRVHQEEKRKVEEKRRELEEETNAFQSPEXAVEALQSQPLHATSQQPLXEGQGQEEQFSXRSTPAGP

SEQ ID NO: 282 - protein, 181 aa, Homo sapiens
  SITE (2): Xaa equals any of the naturally occurring L-amino acids
  SITE (3): Xaa equals any of the naturally occurring L-amino acids
  SITE (16): Xaa equals any of the naturally occurring L-amino acids
  SITE (113): Xaa equals any of the naturally occurring L-amino acids
  SITE (138): Xaa equals any of the naturally occurring L-amino acids
  SITE (139): Xaa equals any of the naturally occurring L-amino acids
RXXVLAAGCWAASGNXGERAADTILFNAYKKEIFTTNNGYKSMQKKLRSNWKIQSLKDEITSEKLNGVKLWITAGPREKFTAAEFEILKKYLDTGGDVFVMLGEGGESRFDTXINFLLEEYGIMVNNDAVVRNVYHKXXHPKEALVSSGVLNREISRAAGKAVLGSLMRKAVETMPSECVF

SEQ ID NO: 283 - protein, 213 aa, Homo sapiens
  SITE (1): Xaa equals any of the naturally occurring L-amino acids
  SITE (17): Xaa equals any of the naturally occurring L-amino acids
  SITE (179): Xaa equals any of the naturally occurring L-amino acids
  SITE (195): Xaa equals any of the naturally occurring L-amino acids
  SITE (205): Xaa equals any of the naturally occurring L-amino acids
XSTAVAAALELVDPPGXRNSARDKTMALKNINYLLIFYLSFSLLIYIKNSFCNKNNTRCLSNSCQNNSTCKDFSKDNDCSCSDTANNLDKDCDNMKDPCFSNPCQGSATCVNTPGERSFLCKCPPGYSGTICETTIGSCGKNSCQHGGICHQDPIYPVCICPAGYAGRFCEIDHDECAXKPLPKWGPCARMELMXTPASGPRISXQTLRLGSG

SEQ ID NO: 284 - protein, 247 aa, Homo sapiens
  SITE (145): Xaa equals any of the naturally occurring L-amino acids
  SITE (147): Xaa equals any of the naturally occurring L-amino acids
  SITE (148): Xaa equals any of the naturally occurring L-amino acids
  SITE (185): Xaa equals any of the naturally occurring L-amino acids
  SITE (201): Xaa equals any of the naturally occurring L-amino acids
GLLCALLSLLAGHGWADTRAIGAEECRPNSQPWQAGLFHLTRLFCGATLISDRWLLTAAHCRKPYLWVRLGEHHLWKWEGPEQLFRVTDFFPHPGFNKDLSANDHNDDIMLIRLPRQARLSPAVQPLNLSQTCVSPGMQCLISGXGXXSSPKALFPVTLQCANISILENKLCHWAYPGHISDSMXCAGLWEGGRGSCQGDXGGPLVCNGTLAGVVSGGAEPCSRPRRPAVYTSVCHYLDWIQEIMEN

SEQ ID NO: 285 - protein, 194 aa, Homo sapiens
GKLVRLQVPVRNSRVDPRVRAVREKKIQSILNQKIRNLRALPINASSVQVNAMSSSTGELTVQASCGKRVVPLNVNRIASGVIAPKAAWPWQASLQYDNIHQCGATLISNTWLVTAAHCFQKYKNPHQWTVSFGTKINPPLMKRNVRRFIIHEKYRSAAREYDIAVVQVSSRVTFSDDIRRICLPEASASFNQI

SEQ ID NO: 286 - protein, 96 aa, Homo sapiens
  SITE (89): Xaa equals any of the naturally occurring L-amino acids
  SITE (92): Xaa equals any of the naturally occurring L-amino acids
VSAQRVLPFDDNICLREPCENYMRCVSVLRFDSSAPFIASSSVLFRPIHPVGGLRCRCPPGFTGDYCETEVDLCYSRPCGPHGQLPQPXGRXHLPL

SEQ ID NO: 287 - protein, 146 aa, Homo sapiens
APGPGRDGTENWRLGLFSASRSWLSFQASTVCTWSQERACAYSSVQLLKDVTELQILGEISFNKSLYEGLNAENHRTKITVVFLKDEKYHSLPIIIKGSVGGLLVLIVILVILFKCGFFKRKYQQLNLESIRKAQLKSENLLEEEN

SEQ ID NO: 288 - protein, 257 aa, Homo sapiens
  SITE (234): Xaa equals any of the naturally occurring L-amino acids
PGTSDLLASQDLCGEALLLPWGDNLSSRLQGDREDHRASMDPDSDQPLNSLDVKPLRKPRIPIIIALLSLASIIIVVVLIKVILDKYYFLCGQPLHFIPRKQLCDGELDCPLGEDEEHCVKSFPEGPAVAVRLSKDRSTLQVLDSATGNWFSACFDNFTEALAETACRQMGYSSKPTFRAVEIGPDQDLDVVEITENSQELRMRNSSGPCLSGSLVSLHCLACGKSLKTPRVVXGEEASVDSWPWQVSIQSTNKHCL

SEQ ID NO: 289 - protein, 153 aa, Homo sapiens
  SITE (16): Xaa equals any of the naturally occurring L-amino acids
GKCKKNYQGRPWSPGXYLPIPKGTANTCIPSISSIGTNVCDNELLHCQNGGTCHNNVRCLCPAAYTGILCEKLRCEEAGSCGSDSGQGAPPHGSPALLLLTTLLGTAAPWCSRCHLQPHRTGLCRGEADTTQTFATNIGNTHIQTPPLRQCTN

SEQ ID NO: 290 - protein, 288 aa, Homo sapiens
PTRPARQVGLRRCLQAASGPEAPARARVHLQSQDTAAATMATPGLQQHQQPPGPGRHRWPPPPGGAAPAPVRGMTDSPPPAVGCVLSGLTGTLSPSRSCSVCTSPSSPPATGTGPAAPTAICQPPCRNGGSCVQPGRCRCPAGWRGDTCQSDVDECSARRGGCPQRCVNTAGSYWCQCWEGHSLSADGTLCVPKGGPPRVAPNPTGVDSAMKEEVQRLQSRVDLLEEKLQLVLAPLHSLASQALEHGLPDPGSLLVHSFQQLGRIDSLSEQISFLEEQLGSCSCKKDS

SEQ ID NO: 291 - protein, 140 aa, Homo sapiens
  SITE (131): Xaa equals any of the naturally occurring L-amino acids
NSALRHSRELPGLAGVGYPYHRNAGTIASSRPLLSAEPLWSCDSENQNFLCLLLAASLFSCVKPSRTPAPHCICSSRSASSWPTSSSSWGLIELNPRCCAPSSPVLCISLPGRLHLDAAGGCAPLPHCTEXDSGQLLKHQ

SEQ ID NO: 292 - protein, 85 aa, Homo sapiens
RMKLRKREFIKHIILGEEVINLYFPSCLFSTIGSQQMCGKGGMCASWKRSRLSLKVLKGSVGRTHVLSKAIDDDQVRVILLAEHP

SEQ ID NO: 293 - protein, 363 aa, Homo sapiens
  SITE (256): Xaa equals any of the naturally occurring L-amino acids
  SITE (343): Xaa equals any of the naturally occurring L-amino acids
  SITE (344): Xaa equals any of the naturally occurring L-amino acids
  SITE (347): Xaa equals any of the naturally occurring L-amino acids
PYGTVESFQGWLAWDTRTTEMQGPLLLPGLCFLLSLFGAVTQKTKTSCAKCPPNASCVNNTHCTCNHGYTSGSGQKLFTFPLETCNDINECTPPYSVYCGFNAVCYNVEGSFYCQCVPGYRLHSGNEQFSNSNENTCQDTTSSKTTQGRKELQKIVDKFESLLTNQTLWRTEGRQEISSTATTILRDVESKVLETALKDPEQKVLKIQNDSVAIETQAITDNCSEERKTFNLNVQMNSMDIRCSDIIQGDTQGPSXIAFISYSSLGNIINATFFEEMDKKDQVYLNSQVVSAAIGPKRNVSLSKSVTLTFQHVKMTPSTKKVFCVYWKSTGQGSQWSRDGCFXXHVXKSHTMCNCSHLSSFAA

SEQ ID NO: 294 - protein, 148 aa, Homo sapiens
AHSARDGVNCDKANCSTTCFNGGTCFYPGKCICPPGLEGEQCEISKCPQPCRNGGKCIGKSKCKCSKGYQGDLCSKPVCEPGCGAHGTCHEPNKCQCQEGWHGRHCNKRYEASLIHALRPAGAQLRQYTPSLKKAEERRDPPESNYIW

SEQ ID NO: 295 - protein, 111 aa, Homo sapiens
  SITE (15): Xaa equals any of the naturally occurring L-amino acids
  SITE (16): Xaa equals any of the naturally occurring L-amino acids
QLAAGKPSDTFPRLXXALVTKDSVADPHNLKICCRVNGEVVQSGNTNQMVFKTEDLIAWVSQFVTFYPGDVILTGTPPGVGVFRKPPVFLKKGDEVQCEIEELGVIINKVV

SEQ ID NO: 296 - protein, 179 aa, Homo sapiens
  SITE (6): Xaa equals any of the naturally occurring L-amino acids
  SITE (164): Xaa equals any of the naturally occurring L-amino acids
  SITE (178): Xaa equals any of the naturally occurring L-amino acids
WIPRAXGIRHEGNWGCYTEQQRCDGYWHCPNGRDETNCTMCQKEEFPCSRNGVCYPRSDRCNYQNHCPNGSDEKNCFFCQPGNFHCKNNRCVFESWVCDSQDDCGDGSDEENCPVIVPTRVITAAVIGSLICGLLLVIALGCTCKLYSLRMFERRSFETQLSRXEAELVRRELLPRMXN

SEQ ID NO: 297 - protein, 195 aa, Homo sapiens
  SITE (4): Xaa equals any of the naturally occurring L-amino acids
  SITE (39): Xaa equals any of the naturally occurring L-amino acids
  SITE (134): Xaa equals any of the naturally occurring L-amino acids
  SITE (158): Xaa equals any of the naturally occurring L-amino acids
  SITE (171): Xaa equals any of the naturally occurring L-amino acids
  SITE (176): Xaa equals any of the naturally occurring L-amino acids
  SITE (183): Xaa equals any of the naturally occurring L-amino acids
  SITE (192): Xaa equals any of the naturally occurring L-amino acids
  SITE (193): Xaa equals any of the naturally occurring L-amino acids
APPXPSSQAPPCRPRPSCRPRPGMASLRWCAQPTPPGCXCGTGAASVCHPADIDECMLFGSEICKEGKCVNTQPGYECYCKQGFYYDGNLLECVDVDECLDESNCRNGVCENTRGGYRCACTPPAEYSPAQRQXPEPRKEMDVDEWQGPGKPCRPCPXASNLAGAPTRLRXVGPPXGCPGPLXGRELASFPXXPR

SEQ ID NO: 298 - protein, 63 aa, Homo sapiens
GKSYSHHCCTKPLQEKPPPGKPAPSQTGSRVPQTAPPHPLPPCAHALGPGKPVHLNNFRLECP

SEQ ID NO: 299 - DNA, 383 bp, Homo sapiens
aagaattggtactgaaaaagagagaatgccaaaacttaagctgacttagaagttacattaacaggattcagtgattgtttggatgtgggaaagggagctggtaagatggtgtgatagttaatttggggtcaacttgggtggactaagggatgcccagatagctggtaaaacattatttctggatgtgtctgtgagggtgtttctggaagagaccagcatttgtatcagttgactgagtaaagagggtctgccctcataaatgtggatgggcatcattcaattcattgggaacccaaatagaataaaaaggtggaagaagaggctgggcgcggtggcttacgcctgtaatcccagcactttgggaggctgaggcaggtggatca

SEQ ID NO: 300 - DNA, 465 bp, Homo sapiens
aaacggcgaacaacgccagcaaggtacgactgcggacatgatccataaaatcgttccgctgatcgcttatatgagcaagttttttaccctcaaggccggtgacgttgtgttgacaggcacgcctgatggcgtcggcccgttgcaaagcggtgatgagctgacagtcactttcgatgggcattctttgacaactcgcgttttgtaatactttttgccgcctgaaagcggcggcaaaacttgcatcgctgtgccagactggttataaggtgcgttttaacgtaatggcggaacacctgatgagcgatgtacctttctggcaaagtaaaaccctggacgaaatgagcgatgcggaatgggagtcgttgtgtgatggttgcggtcagtgttgcctgcataaactgatggatgaagacaccgacgaaatctacttcactaacgtcgcctgtcgccagctcaatattaaaa

SEQ ID NO: 301 - DNA, 638 bp, Homo sapiens
tgattctgccgctggatgggcggaagaaactggtcaatgccgatattgaaaaggttaaacaggcattaaccgagcaaggttactatttgcagttaccgccaccacccgaagatttgctgaagcaacatctttccgtcatggggcagaaaacagacgacactaacaaataaccgatatccggcggtggcattatctttgtcggcgcgggttttcatatccacgataaggtgaggggaacgttatgtatcaacatcacaactggcaaggtgcgctgctggattatccggtgagtaaagtagtctgtgttggcagtaactatgccaaacatattaaagagatgggcagcgcagtgcccgaagagccagtgctgtttattaaaccagaaacggcactgtgcgatctgcggcagccattggcgatccatccgatttcgggtcagttatcatgaagtcgacctggcggtgttgattggcgcgacactgcgtcaggctacggaagagcatgtccgcaaaccatgcccggttatggcgtggcgctcgatctgacatgcgtgatgttcagggaaaaatgaaaaagccgggcagccgtgggaaaaggctaaagcgtttgataactcttgtccgctttccgggtttatt

SEQ ID NO: 302 - DNA, 25619 bp, Homo sapiens
gcctacaacacagcagtcccctcaggatgagcaggaaaagctcttggatgaagccatacaggctgtgaaggtccagtcattccaaatgaagagatgcctggtaagaatggagatgtgggaggcacagttgcagttcgtgtgttcctaaggaagcatgtgcagtgtcttctagagtcaggtgtttctggtaaatctaatcttcaccgtttaccagcatctatcttcagtctcatctccctcaagcactttgtggagcaatttcaacaaagagccctgtttactcacatgtatatttatggtttgggattgtctgtcttccctactagaatacaagctcataagaataagagacccttccttttatttacacattactgtattattaccacaccagtgtctgaccagaattactagcctccttggttctatacctcagacctgaggaatatttaacatataataggtactcagtaaatatttgttgaatgaatggatttaaatgctttgcatttgaattattcagctttttttctaaatatcttgaaaactttaatttctttgctgaatagatatatttattgtagaagctagcttaaaaattatacttaacacttatttacatatttttatattctaaaagataaagtaagagataatctgtgtagatacttttgattctctggattaaaatgtaaggaattgagccaaattggttagtactttaaactataaattactgtgatgaagatgatgctattttacctttgtaaaatgtcttactgtgctttctaaagcatagtaatatgctcttgtgtcttttattggtttaattcctaacaaattgggaatgaaaaataaatgtcttggaatggagaagctgggtttgctattgcttgcttctttctcttcctgtgtatggatagtgtttcctctatctcaaggaattgcttgcatttctgagttaagtggaacatatgggcattgtgagggcttgaagaatgcaagaggaaagcaaacttacatggatagtcatttcagacagctctgaagagtctttaacccatgacaaagccatgtcaggatagtatcttccttcacctgaatcagtatgccagttctcttgattgcaggtaaaatgtgatgaatggagctagtttcctagtctctatagattgaaaagattagcattctatcaagaagcttgcagtcttagctatgttaagtcttactaagaatcatgtatctttttctttttcagtagagacggcaaggtgaaccgatctaagttgtttttttaatgtggttaaaatcatttaagtgcggtattcttttaaaactatgtaacaagtccttgatgtaaagaatttgtacaaccaagataaatgtttatttaaattaagcattctcatctattctcttggtatttctgtaggacaaaaacaagcttatggatgctctaaaacatgcttctaatatgcttggtgaactccggacttctatgttatcaccaaagagttactatgaactttgtatcttttgaatgttgaagactaaacatttggaccatacctttttcttgataaggcctattttgtttgttctttatgaagtttttctggagttatcttattcttcgttatctgagtcacatggcactccttctccatgcagatgtgctaagtgagaaaaacactttgagagtactcctttcctatgcttaaacatctttaaatgtgttgtcggtgcatctcaattttcagacccttcatgaggatatttaggctatgacacagttggttctttaatacttagattttgttatgcagcagtctcaaatggacaggaatttaatcatttgccatttcaaaacccattagcagtctgacaggtaaccattgtatttactgctttgcttgaccacacatgctttaaaacccttattttaaagtaagaaaagtccggctaaaattcatccttcgcttgaacactttcttaaaggactaaaacttaagatgtctgcccagtagttagtaatgactccaacaagtttcaaagttttgtttaggttggcttatttttatttttagtccttaatcataattaaaagatatggccatttctgatgaactgcactacttggaggtctacctgacagatgagtttgctaaaggaaggaaagtggcagatctctacgaacttgtacagtatgctggaaacattatcccaaggctgtaagtaattacaaatcagagaacttttgtgtctgtatttctcactatatgttacgtcttttatgattatcagcttaagaaaaagttttaagggtaacttcttaacaaattgagatgaacattttggtagatattctcttacttgttttagagtaactagatttacgttttatgtagatatttgaggaattttggaaatagaaaaaatggacatgcttgctattttttttaatgtcttgactattagaaaaattaatataattgttctcttcctaatatgtttaaaggtaatatctatgttgtatatatacagtgtgtgtgtgtgtgtgtgtgtgtgtgtgtgtatagtttttttagaggtcagtcagtggttatattttaaatgagatattttccttgtcatgcgggagaaaacaacatggttcctgtcttgtttatttaatgttttgttcagtgtgtttggaaataaattcttgatttgaatattttatttctaatcagcatttcttcataattttcctagttaccttttgatcacagttggagttgtatatgtcaagtcatttcctcagtccaggaaggatattttgaaagatttggtagaaatgtgccgtggtgtgcaacatcccttgaggggtctgtttcttcgaaattaccttcttcagtgtaccagaaatatcttacctgatgaaggagagccaacagagtaagtgattttctttcttaattttgttgcaatatttctttcattgtagaatgtataaaagtgtggaaacatatacagaaacaaagtgtgaataattcttccacccagtcagccatttaggtagcatttgtatatagatttcctttgtaatatagaactcctcagtatatgtggtatcatctaaaatgtactcttatgcaaattttatctttggattgttaggacctgcttttttcatttaatgtaattttttctactacattaaatcttctttgaaaataaaacttttttaagagagttgtatttggaaattgaatttgtaatgaaataataaagtgtgagccagctggatttcataattgttcctttagtgtctatcagtttttataatttatagactgctagttaccttggaatataagtgatttgaattatctgttacgagttagctattaactccagagaaggaaaaataaaagccattcagagacactcctgtctcttgtgttatcagtattctagcatcaaagtctactgtacttttatcccacagcaggggcagatggtcagccaactgtggtcttcagtggggtgagctgttcacatgacaggtccccagattaaagaacttcattccttttttaaaaagtttattcatttattttctttctttttttaatttttaatcttttttcagtttgccccaacagattttgtttttttctttttaatattttcatttatttctaaggtttttaatatatcatttatttctaatgttttttaatatatctgcatcaatttcttttaaaacagtacagaaaagataaaacatttaacaatgtagagaaattgatgaagttacttgctttattatgttttgagtgtccgttttgagcatttaattaggcaatcaataacaatttttgaaaggtactgaggtctccatcctaggagacgtagaaaaataaagcaggaaatccatggtctcttccctcacaaagcttacattccaattaaaaacaaaatattcaacagtaaaatgatgtagttagcagtacaccataagtgttacattttttagccttttgtttttgtttttggtttgtggggatggggtctcattatgttgcccaggccagttttaaactcctggcctaaagcgatcttcctgccttggcctcccaaagcactggattacggacatgagccaccatgcccatccttctagcctttttcaattaaggaagttgccataagagcaagtccagttggcccaggatgaggagttggggaaagtaatttgccctttaaatttatactgtcctctccatggtactttttaccctagagtctgttccctttgaaatttaacactaagccaatgaagttgaaagtgattttttataaagcattggtgtactatagagataagtaggaaatacacaaaggagaaggatagtagtaagttggtcctgtaaatactgtgtaaagacttttctgtttctttgcagtgaagaaacaactggtgacatcagtgattccatggattttgtactgctcaactttgcagaaatgaacaagctctgggtgcgaatgcagcatcagggacatagccgagatagagaaaaaagagaacgagaaagacaagaactgagaattttagtgggaacaaatttggtgcgcctcagtcagttggaaggtgtaaatgtggaacgttacaaacaggtttatatatttttgttacctcttcttatgttcagagataaactgaaatctgatttttaaaatcagaatatttttgttatacaatagtacattgaaaaacatcttaaaatggctgttattgaagaagacttaaacggaaagatatatatgcagtgtttgtggattggaagacttaatattgtcaaaatagcatttaaaaagaattgatttatagatccaatgtaatctcagtcaaaatcccagcagacttttgtagaaattaagaagctgattctaaagtttatatgaagaaacaaagaacctggaacagctacaacgaatttgaaaaggaagaacaagttgaaagacccaagcaacctgaattaatgatttactctaaagctgcagtgagatcctgtgtggtattggtgaaaaggatagacacacaaatcaatggaggggaataaaacagggaatggcaaactttacctgtgagggaccagataataaatggtttttggctttgtaagacatgtgctgtacaacaagcttgtccaacctgcagcccaggacagccttgaatatggcccaacataagtttgtaaactttaaaacatgagattttttgcttttttttttttttttttttttttttttaaagctcatcagctaagtgtattttatgtatggcccaagacaattctaattcttcttcaagccaaaagattggacaccctagtctacaactaataacagtgcagatatggtgcaaaagcacccacaggcaatatggaagtgaatgggcatggctgtgttctagtaaaactttatttgtaaaaacaagcagcagctcagtttaccgatctctgactggacaatccataatagacccagatatttatgatcagttatttttgataaaagtacaaaggcaaccttttcagcaagtgattctggaacaattggatgtttatatgcaaacaaaaaaccctgaaccttgacccatccctcataccatatagaaaaaacacagaaatcaatcagagacctaaatatagaacctaataatgttagaagaaaacacagaggaaatctttatgacctaggattagacaaagatttctgaggatatacaagcacaagccatgaagaaaaaagctcacttttgagaggccaaggcagatggatcacttgagtccaggagtttgagacaggcctgggcaacatagggagaccccatctctacaaaaattaccaaaattagctgggcatggtggaacgtacctgtagtcccagcactcaggaggcttgaggtgggaggatgacttgagcctaggaggtggatgttgcattgagtggagattgtgccacttcactccagcctgggcaaccgaacaagaccttgtctcaaaaagaaaaaagcttttaaagtttagaagtgaagtcttggtgagaaaaatctcaaatacgattttcaagttagtagttcaaatgcgttactagaggaatagcttaagattttgaaaacagattttaacccttatgtgtgttttttctcttttagattgttttgactggcatattggagcaagttgtaaactgtagggatgctttggctcaagaatatctcatggagtgtattattcaggtagctgggaacatttcatttttttttaaacgacctattttatctttcattaaatttaattgttttgaaaaaattttgatggaataggaaataagctttcctgaataaagagttttccttgcggggtgtggtgactcacacctgtaatctcagcagtttgggagttcaaggtgggaggatctcttgaggccaggagttcaaaaccagcctgggcaacatagcacgatgccgtttctataaaaaattaaaaaaatttttttagtgtttcttttttttttcatgtaatcttgcttcttctaaaaataatttaaaaataggaattttctgtttctaacttataccttggtctttgtatcaatgtggtttgttttcctccaaaatgtaggaatgagtaatctgagttttctaggtctctgtagctttagtttaattgtaggtgcactttgtttattggaatatttctgtctgagcttatgtttagtagagaggttcaaaagtaatgtgtttgaatttagttgtataagaatacagtgtttttttcccacaaatgtgaactttaccatatgtgagtccagaatattacgtgaaatacttttatttgtattgatcatttgattttcaggttttccctgatgaatttcacctccagactttgaatccttttcttcgggcctgtgctgagttacaccagaatgtaaatgtgaagaacataatcattgctttaattgataggtaagaccttccaacactggcggataaatgctctgacttgggaataatgaattttaaacatttttttgaattatttgtttctgttacatctttatcataccaatgatcttaatttaattatactataaataatttagctttgtgagtatgagtactaggtacttgtctaggttagacatgaaagaggcttaacttaaatgtgcaggagacgtgaagataatgaatatctttattctgtgtgcttaattgacatttaaagatgttgtacagacttattttttaaatcatacaaatccaaagatcatattgaagaacaaaatttgttttttaccatgatgtaagtatcttgcagtgggaactcatttgatttagagtagccgtaagatactgatgattgaaaatgttcaagtaatcactctatcatcacattttcttaaagaaaaaattttaagtatcaaatatgtttagtacatccacttttttattttcttaggtttttttttttttttttttttttgagacagatcctcactcttgtcacccaagctagagtgcagtgacgctgtctcggctcactgcaacctctgactcctaggttcaagtgattctagtgtctcagcctccggagtagctgggattacagacatgcaccaacaagcccagctaatttttgtatttttagtagagacagggttttgccaggttggctaggctagtctcaaactcctgagctcaaatgatctgcctgcctcagcttcccaaagtgctgggattacagacatgagccactgcgcttggccaatgggtggcttttttgcagccatgttatgtagtagtatatgatgtctgtcctacacttgtaagcattgtcatgaaaccagaaacctaagagaagatttatttctgcagataccttttgtatgttttttaaaaaactaagttattagttttaaagtctgagaatttagataacaaatttttccaaattgtcagctcaatcctgggcagcaaaaattccatacttattgggcccactcttaaaggaagctagtaactggattttcctgagttgcctgtaatgtcacttacacatctctgtcagtagtgatgcttctgggcatagcaaaatgtggatgtagttgtgactgacaaacagataatgataatgaaacatactattttgagtaatttaagatgtgggaaataaaagttaattttatgaattttagacttagttgtatttcaagctttagtaaaaatgcagtatcttaaaatagtctatgtacttttattttttaaaggttatttatttaaatcatggttgttgaatacatttgtcactttaatgcatttctgtccatatctgcttaattatgcttcaaagagttgagagaattatcttgttgaaaatctacttaatatggtgtgaaataagaatgctgatgaaaaaggtttcattggcaaaactgtttagttaaaaatgaattgaggaggccgggtgcagtggctcacatctgtattcccagcactttgggaggccaaggagggaggcttgcttgagtccaggtcagtaccaccctgggcaacatggtgaaaccccatcactacagaaaacacaaaaattagctgggtatggtggcacatgctgttagccccagctactcaggaggctgaggtggaaggaggatagcctgagctcagcaggtggaggtttcattgagtggagagtgcgtgactgcactccagcctgggcgacagagcgagactctgtctcaaaacaaaacaaaacaaaacaaaaaaaacaaaaaccttttgggctcatacaaaatatagaaaagcaataaagaataagatgtcatccatgatctcactacccaaaccctgtatcttttaaaataaaggggtgttttttttttttttagattagctttatttgctcaccgtgaagatggacctggaatcccagcggatattaaactttttgatatattttcacagcaggtggctacagtgatacaggtttgtgtagcatttctcctaagttctcaaaactttgaaacttctctgccttccttttacaattgtttaaaataaattgtgtggttttctaaacattccagtctagacaagacatgccttcagaggatgttgtatctttacaagtctctctgattaatcttgccatgaaatgttaccctgatcgtgtggactatgttgataaagttctagaaacaacagtggagatattcaataagctcaaccttgaacagtaagtcagttacatttttgtaaaaatcctcaaagatatttttgtcctagatttgcttttctttctcaattgttttttgaactgctggcatttgtcttgttttaatcatgcattaagattgtcatgcttagcactactaggggcagaaagtagtgaccaattacttgtttttttatattaaggaaattgtggtacctatggaccataggcagtcttcagggaccagtgtctccaatttggatccctttctgtgtgtcaggggcatccaatcttttggcttccctgggctgcactggaagaagcattttcttgggccacacataaaatacactaacactaacaatagctgatgagcttaaaaaaaaaatcccaaaaaaactcataatgttttaagaaagtttacgaatttgtgttgggccgcattcaaagccatcctgggctgcatgcggcctgtgggctttgggttggacaagcttgcatgtgactgagtttgttcttaaactggtaaggaaactttgtcaggcagtatttatttccataagtggtgttttcctacgaatcagcacatggtgaaaaatgaggggctatgtatatttaaggtgcagaattaaattggtttaaatatcttttctattttgagctttgattttgataccttaaaggaaatatcaacagtactatttccaacctgaagcctcctcagctgttctgtcctagacttatggcgtcctctagtggccactatgggcagctatgatcctgttaccttccccagcagttcccttcctgccctgttccccactgctctggcttgggtcaagccaggcctgcctcccgccaacatattcttcagaattttacctcatgtaatcttcctcctttctatctcccttccagtggtttacctgcatcaagaaaatttcttctttttttcctccctttgtgttacccttgttcttttggtcatttttggttttgtgtgtgtgcaaactgaaaacaagtccagatgtggaatgataagtgtgagagaaaattaaatgatgtgccaggtgtggtggcttgcacctgtaatcccagctattcaggaggctgaattgggagaatcacttgagtccatgagtttgagaacagcctgggcaacatagcgagaccccgtctctaataaaaaataaaattaaaaataaaaaaaatttaaattaaaaaaactaaatgatgtatctgtgtctttctccccaagtgaattttaaagtaaaaatagacaaagtaattagaaataacaacctctaaagaggttgtaataaatgccccaatatgcctcaatatctacagaatgattttactaacaactacgtaaaagtcagtcagcctgcttttccttaatcaccaacatctgatgcagaagaaatagtttatgtgtttttctgttgtgtcaaattgctggttttgcatggagtttttttcctatttattttcatcatgaatatacaatacttgttggctggcccctgggaaccaaactaccacttaaaatacttcccttagaaatgtcatcaaattctagacagtcatcttaactccagctataccatctgttcatgagttggaaactgtatctagttttgtatcaacagaaaaataatagatgaatatatatttgtgtttagataagcatttttatcctcctgaaaggaggttgttatagtcttctgtggtggtatgattcacttgacccatttcctttaatgtgtaatgaaaaatttcaaattcttatggaacaaatgctatttgtgtatatagaaagttaattttattcattaagacttctgtttttctttttgtagtattgctaccagtagtgcagtttcaaaggaactcaccagacttttgaaaataccagttgacacttacaacaatattttaacagtcttgaaattaaaacattttcacccactctttgagtactttgactacgagtccagaaagagcatgagttgttatgtgcttagtaatgttctggattataacacagaaattgtctctcaagaccaggtaagagaatacctacgtgctattttagggaaacagtgttacaattttagactttggacctagatacctgagatgggaggggagggtaattcaatactaaataaaatttacaagtaactttttcattatataaattaaaaattggagatgtataaagaattataaaacatttataattccaccagatagagaataaccactgttaattaacatttggtgcatatctttccagacttttgtctgtatatgtgtgtatgacatacatgtgtatcgactttctcaccaaaaaaaggaatatcttgttgatactgtattgtaattttataactggaaacacttttgataatggctttgtatgccaatggtttcacctcagtgggtttcttgtgcctcgcatgttacaggtggattccataatgaatttggtatccacgttgattcaagatcagccagatcaacctgtagaagaccctgatccagaagattttgctgatgagcagagccttgtgggccgcttcattcatctgctgcgctctgaggaccctgaccagcagtacttggtatgagtttacccttagtatatccctgtatcagctcctagtgaaatcacatgttcaagtgcttaaaatggtttaattcactttctggtcttagatggttttgaaggaattgcaactgaattaaagattcacttgaacctgggaggcggaggttgtagtgagccgagattgtgccactgcactccagcctgggcaacacagcgagactccatctcgaaaaaaaaaaagattcatggcatccatgggcttttactttatatataaacacataattgtttgtaaacttctggagcatgtgagtaacaattcagttgctctgatttcttttgaagactctctgagaattacaaaaaagtctgtcttcttttgcttgagtgccgataattattccatgttcattttttctgaactatgtattgcttataataaactttataagaaatacaattcttatatttaattttacttttccaaatttgcaagtataaattatatttgtcatattgaaaatgtgagtttttgttttttgatgaaagatttaaaaattcattttgcctttttcttaacttttttttttctgataaagaacaatcacatgaggttctctctttattattagtccacagggaatcattgtgaaatggataaaacatgttgcctgagtaggtgtatcagtgaccgatactagatagatagtttattttagtgaagggttagcacagttggctgcttaattattgtttgggcaaagtagtttaaccattcttggatgcataaggctattaggctgctatgatgaaaaagacatttgcttgaggatgtcctgactgtctcatccctttctgttgactttcttcattgtagttgacacacctgtacttcataatcagtgtgaaataagaggctgacttctgttgatagtgtgatggtctttgtcttggtttagtgacaaacattccaggactgtggtattgtgctctgtgagctatgtgatctgtacagagtgactgtcttaagtattttaactgattgccttatgtttctgtgtgagattgtttgtatctgtgtgttttcattttctattgcctaccaaatatagtagttagaaactattccttccggcggggcatggtggctcgcatctataatcctggcactttgagaggctgaggtggatggatcacctgaggtcaggagttcaggatcagcatggccaacatggtgaaaccccatctctactaaaaatgcaaaaaattagctgggcgtggtggtgggcgcctgtaatcctagctgctcaggagactgaggcaggagaatcacttgaacctgggaggtggaggttgcagtgagtggatatcatgccattgcactccagcctgggcaacaagagtgaaactccgtctcaaaaaaaattatgccttctgcatgtggctgattggttattcccatgtatggagatctttaatgatagggtcattagctctgactgcccctaggggaaatgcattctcttattcatctaccatatcaggaatttcacaaaacctgaatgccattgtgtcacatatactaaaaatattttataaactctgtgtttttcttgtaatttttctgaattggctatatgttgtgccatttcagaaaaaaaaatccaagaaaaacacagaattcatggaatatttcacaagtagctcttttaaagtatgttagcattttccttgacttaaatggtcttaaaatttttttgaatgaggaggtatgatgtaccagtaatatgcatatagttgttgtgtatcatagtaatagttaatattactgagcttatgccttgtgctaagtagtggtaagccttcacatgtgtcacttgatcttcccaacaaccctaggagtttatagaaacttgtggctaagagaaggtaaataatttgcccaaggccacacatgtaataagtattagcatctgcttttaaatgtgagtctctgagtatcttcacagccttctttttttctcttttcttttttctttttttttttttttgagatggaatcttgctctgtcacccaggctggagtgcagtggcatgatcccagcttactgcaacctccatctcctgggttcaagcaattctcctgcctcagcctcctcagtagctgagattacgggtgtgcgccaccatgcccagctaatttttgtatttttagtagatacagggtttccctatgttggccaggctggtctcgaactcctgacctcaactgatctgtccaccttcggcctcccaaagtgctgggattacagacatgagtcaccacacctggccagagcctacattctttatcagtgcagcatactttgcacatgtgtgtatgaaaatatatttaaatatatctttgcttctaactcgctaccttgggcaggttatacaacctctctgaaactcaggcttccccatttgtgaaatggaatagtatctgtctctgggttgttgtgacaacttgaggagataagaaatatgtaaattgcctaccataaagtatggtacattgtatatattcacaaaatgttagcaatgatgattagagcccacatttatttcacaaatgattaatcagagtttggaaatttttttttctttaatgcttttgggtcagattttgaacacagcacgaaaacattttggagctggtggaaatcagcggattcgcttcacactgccacctttggtatttgcagcttaccagctggcttttcgatataaagagaattctaaagtggtgagtttacttttaagtatttaggtactttttttcctctttcatcactctgagtgtgtgtgtgtttgttttatattataaaaaatttcaaacgtacaaaaatagacagtggtataataaaatcccattttcgccaactctctatttgttacttatcctgtgctaagtgttcctaacggtgatggtggtggatcacatactgagggatcacgtaaaaagcacttagaaatgcaagattaaagcagtgtgaatttatgctgaaactctttcctaagttctaattcaggttagctttaaaacctaaggagagggcctagcattgcagtcgtttctctctaaaggcatatcattgaataatatgagttgtgggcaactttttatgagcttttttcttcctcaaaatggaaccatggcttgagtcttcacagtgtagttttgaagaaaatacctcaagctcacgtacctgaaagttggacattcaggttaatgttaaggaacaacctcagtaacttaattttgtttgtttgtttgttttgagatagggtctcattctgtcgcccgggctggagtacagtggcgcagtcttagctcactgcaacctccaactcctgggttcaagcgattcttgtgtgtcagcctcctaagtagctgggattacaggtgtgcaccaccatgcccagctaatttttgtatttttagtagagacagggtcttgccatgttgaccagttggtctcgaacttgtggcctcaggtgatcctgctgcctcagcctctcaaagtgctaggattgtaggtgtgaaccactgcatctggcctcagtatggacttgattttctcgtaatagagaaaaaagatgtatgcagtagacctaccagcatgaaacagcagcttttggccaatttttattaggccagcttatcattcactctttaccagcgtttatggataggaatttgtgaatataacaataaaaatagcaaccagcctacattacaaagccatagtaattaaagcagtatggtaatatggtactggcataaaaacagacacatagaccaatggaacagaatagagagtctagaaataaacccacacatatgcaataaactaatctttgataaggacaccaagaatacacaaaggggaaaagaatggtctcttcaataaatagtattgggaaagttggatatccacatgcaaaagaacgcatttggactctcatcttatgccatatataataatgaactcaaaatggattaaagacctgaaaccataaagctcctagaagaaaacatagggaaaaacctccttgtcattggtcaatgattttttggatatgaaaccaaaaacctatgcaactaaagcaaaaataagtttaaaaataagcaaaaaataagtttaaaataagcttaaaataagcaaaaataagtttaaaataagcaaaaaataagcaaaaataagtttaataaactaaaaaccttctgtacaacaaaggaaacaatcagcagagtgaagagacaggcaatggaatgggggagaatatttgcaaactatacatctgaaaagtggtcaatatctaaaatatatatggaatgcaactcaatagcaagcaaatgaataacttgatttaaaaatgagcaaaggatctgaatagacatttttccaaagaagacatacaggtggccaactggtatatgaacagatgttcaacatcatttatcaggaaaatgtaaatcaaaaccactatgagatgtcacctcacatctgtcagaataactgttatcaaaaaaacagaaaatcaagtgttggcaaggatgtagagaaatgggaaccctgtttattattggtgggaatataaattagtatagccattatggaaaacagtatggaggttcctcaaaaaactgaaactagaactaccatgtgaccctgcagtcccacatctagttatgcattcaaaggaaaggaaatcagtatctcaaagagatatctgcactcccatgtttattgcagcattattcacaatggctgagatatggaaacaaccttagtgtccatcgatagatgagtaaagaaattgtgttgtgtatatatgtgtgtgtatatacgtatatatgtgtgtatatgtatgtacgcacatattctctacatagtagaataatactcagctatagaaatgaagaaaatcttgccatttatgacaacagggattaatctggaggacattgttctaagtgaaataagccaaacacagaaaggcaaatactatatgacttcatttatatgtagaattgttttttaagttgaattcatccagcctgggtaatatagcaagacccaatctctattaaaaaataaaaaggccaggtgtgggggctcacgcctgtaatcgcagcactttgggaggccgaagcaggcggttcacctgaggtcgggagtttgagaacagcctgaccaacatggagaaaccccgtctctactgaaaatacaaaattagctgggcgtggtggcgcatgcctgtagtcccagctactcgggagtctgaggcaggagaatcacttgaacccgggacgcagaggttgtggtgagccgagatcgtgccattgcacttcagcctgggcaacaagagtgaaactccgtctaaaaaaaaaaaaaaaaaattaaaaaattagccaggcgtggtggtacatgcctatagtcctagctactcaagaggctagggcagggctgggtgtggtggctcacacctgtcatcctagcactttgggaggccaaggtgggtggatcatttgggatcaggagtttgagaccagcctggccaacatggggaaaccctgtctctactaaaaatacaaaaattagccaggtgtgagggcacatgcctgtaatcccagctacttgggaagctgaggcaggagaatcacttgaacccgggaggcagaggttgcagtaagctgagatcgcgccactgcactccagcctgggtgacaaagtgagactctgtctcaaaaaaaagaggctagggcaggaggacagcttgagcccaggagttggaggctgcagtgagttatgattgtgcttttgcgctccagcctgggtgacagagggagacccagtcactaaaaaatggttgaacttgtgtaagcaaagactagaacagtagttgccaaagaatacaaactttcagttataagataaaaaaattctggggatcaaaacgatttagggcaaataaataaaagtaactagcctttacttatttactagcatttcttactgtgttgtcacccactgtgccaaggtctatgactgccactgtcacttttttttttttttttgagtcaaggtctttgttgcccagactgggatacagtggtatgattacggctcactgcagcttcgaactcttaggctcaagcgatccttccatttcagcctcctgagtagctgggactgcaagcatgtgccaccacactggctaattttttattttttgtagagacagagtctcaccatgttgcctaggctggtctgaaactcttgggctcaagcgatcctcctgcctccttggcctccctaagtgttgggattacaggcatgagccaccatgcccagcctgtcgccatcttttaaaaatgaaaagaactgattgctttaacaagaagaaatttggatagtcaatcatgataaaatatttaacctcgcttgtaattacaacagcgaaccttttaagaaatcaaattggcaaagagaaatgaaaaataaggttcagcaatggcgatggtgtgatgaaaattcattctcatctaatgttggcagtgtgaattactataatacttctaggaagttggcggtgtgtaagtagggtgttaaaatattcaataattttacttccaagtggaattccaagaatttatactaagggaataattagggtctcaataaagcttagtgtatatagaacattcattgtaatattacagattatgtctaaaagggaatagttcaataaattatgccatagccagtctccataatattttctagtcattaaaatgatttcgaattagtatcgggaagattgttaggacaaaataggaaaaattagagctgggtgcagtggctcacgcctgtaatcctagcactttgggaggctgaggcaggcggatcacctgaggtcgggagtttgagaccagcctgaccaatatggagaaaccccgtctctactaaaaatacaaaattagctgggtgtggtggcgcatgcctgtaatcccagctattcggtaggctgaggcaggagaatcacttgaacctgggaggcggaggttgtggcgagctgagatcatgccattgcactccagcctgggcaacaagagggaaactacttctcaaaaaaaaaaaaagaaaagaaaagaaaaattagatacaaattacttgaagtgtgaatcgattttaactctcaagaaaataaggtctagatgcagtggctcacgccagtaatcctagcactttgggaggctgagatgggtggatcacttgaggtcagcagttcaagactagcctggccgataaggtgaaaccccttctctactaaaaatacaaaaaatagcagggcgtggtggcgcgcttgtaatcccagctactcaggaggctgaggcagaagaatggtttgaacccaagaggcagaggtggcagtgagccgagatcgcaccaaagagaaaaaagaaaaccacacacaaaaatgccagttatattacagttacatagaaaaaaagaaaggaagacatttagcatccgaatgttaccagtgattatccgtgggtggtagatttagggatgatgtgtggatgattttgtgtatttttctaattttctccaatttgggaatgtaacttacaaatcagaaaaaacaattatcagccaggtgtgatggctcatgcctgtaatcccaacactttgggaggctgaggcgggaggtttgctcggggccagtagttcaagatcagcctgggcaacagaatgagaccctgtctctacaaaaaaaaaaaaaaaaaaaaaaaaaaaaattagccaggtgtggtgatgcaagcctgtagtcctagctattcgggagtctgaggtgggagcatcacttgaacccaggagttcaaggctgcaatgagctgtgatcacaccactgcactccagctgggtaacagagctgttgaaaaaaaaaaaaggaaagaaaaaacaggttgagtgcagtggctcacgcctgtgatcccagcactttgggaggctgaggcgggcagatcacttgaggtcaggagttaccagcctggccaacttggtgaaaccccgccccacttggtgaaaccccgcccctactaaaaatacaaaattagctgggtgtggtggtgggcacctgtaatcccagctactcgggaggctgaggcaggagaatcacttgaatccaggagacggaggttgcagtgagccaagattgtgccactgcactccagcctgggcaacaagagcaaaactctgtctcaaaaagaaaaaacaaataccaaatacattaacattgcaaaggcaatttaacctcaaatgatgttttgagaagacatcctgcttgatttacttgtttgccctataactgaaacagagaaggaaaatgacaggaaaactgtgcacacaacttacagtattttgttctattaaaatggatatcctggaacaagttaattttgaatttaaggtaacttaaaatgttttttcttgttttaggatgacaaatgggaaaagaaatgccagaagattttttcatttgcccaccagactatcagtgctttgatcaaagcagagctggcagaattgcccttaagactttttcttcaaggagcactagctgctggggaaattggttttgaaaatcatgagacagtcgcatatgaattcatgtcccaggtgatgatctgttctttctgcgttgtcatgtcagctctgctgggttcagttgcttgtttgcaggcatggtggtaatgcacatgaatttactcttcttttactgaatgtgtaactaccaccttcccaccatcatggaacctgttaatattattgttgtaattgactggtgttgatcatttgctgatgaaatctaagatttccaagtgggtcatggtaaaaatgtttcatggaacataaaattcgggaaatgcactcaattcccaaaatccagtttgggaaccctgggttaaacaaagttgaaagaagtttctttattgcaactttttagcgtttttaccatctcagttgtgtcctgtggctctcaagagagggtgcagcatgttctgatatgaaggctgcagaagtctcacaggatggaggtttggtgacaagtactttggaaaatgctcaactagaggatggttggtccttgaaagtcctttctgctttatgttcactaggcattttctctgtatgaagatgaaatcagcgattccaaagcacagctagctgccatcaccttgatcattggcacttttgaaaggatgaagtgcttcagtgaagagaatcacgaacctctgaggactcagtgtgcccttgctgcatccaaacttctaaagaaacctgatcagggccgagctgtgagcacctgtgcacatctcttctggtctggcagaaacacggacaaaaatggggaggaggtaaggtcattcctgactgcatgatagcagacaggatccataacagggatcagttgtcatggccttgtgttctggaggtgaaacatttggggtgcttggaaatctgatgaacaaaattgctttgttttgttaaaaaagagagtctcatcctgtagtgaagcctctgctttgaggatattgtaacatagcaagttcaaaccactacctgtttttaaaaaaatacagctgtatacttcaaaacaagaagaaggagaatgaaaaggatttaaatttgttatgtccctttaaaacacgaaagagccacggtagtgttgtgtttctttgtatgaaaacgagatgtttcattaatctcttcactgtccccctgcccttttattttagcttcacggaggcaagagggtaatggagtgcctaaaaaaagctctaaaaatagcaaatcagtgcatggacccctctctacaagcgcagctttttatagaaattctgaacagatatatctatttttatgaaaaggaaaatgatgcggtaagtgaattagtaaagtgttgttaataaactaatattttcccttcctactcttaggagatttgatatgtacaaaagtttatcattctgatactttaatcactgttcatttgaaaaatgtaaaataatttacagatgtcaaataataggctaatttgtcataatgttctagtttaagataattcctaggctgggcgtggtggctcatgcctgtaatcccagcactttgggaggctgaggcaggcagatcacctgaggtcaggagtttgaaaccagcctggccaacattgtgaaaccccatctctactaaaaatacaaaaattagctaggcgtggtggcaggcgcctgtaatcccagctacttggaagcctaaggcaggagaatcgcttgaacctgggaggtggaggctgcagtgagccaagactgtgccattgcactcctgcctgggcaacaagagtgaaactccgtctcaaaaataataataataataattcctaaacgcagtatccttttagcaatacagttttggtcaagatttgtaagttaaataaaattttgcttgtttttctttttttgacagagtctggctctgtcacccaggctggagtgcagtggcaatctcagctcattgcaacctctgcctcccaggttcaagcaattctcatgcctcagcctcctgaatagctggtattataggcgcccggcaccacgcccagctaatttttgtattattactagagatggggttccaccatgttggccaggctggtctcaaaactcctgacttcaagtgatctgcccacctcagcctcccaaagtgctgggagtacagggatgagccactgagccgagccaattttgcttgttttaaagggttgtttttttttttttttttttgatagtcagtaattgttcaaactaggaattgtatccccatctttcttttttcataattactcaggtaattgatgagtgtaacagaagctcctcaaaacagttttattaaattgcctttcattttttgtggtacgtgcttgatcatgaatttgtacatattcttttgtaggtaacaattcaggttttaaaccagcttatccaaaagattcgagaagacctcccgaatcttgaatccagtgaagaaacagagcagattaacaaacattttcataacacactggagcatttgcgcttgcggcgggaatcaccagaatccgaggggccaatttatgaaggtctcatcctttaaaaaggaaatagctcaccatactcctttccatgtacatccagtgagggttttattacgctaggtttcccttccatagattgtgcctttcagaaatgctgaggtaggtttcccatttcttacctgtgatgtgttttacccagcacctccggacactcaccttcaggaccttaataaaattattcacttggtaagtgttcaagtctttctgatcaccccaagtagcatgactgatctgcaatttaaaattcctgtgatctgtaaaaaaaaaaaaaaaaaaaaacacaaaacccacaagcacttatcttggctactaatgaagctctccttttttttgtttgtttgtttgcttcattgttgattgtgtattttcttcattcctggggagtactaacccaaaagcgtctgtctcttgttttctagtccagtttgagattaatttagaagaaaggaatactgtatgtgaaattcatcttgggctttcccctaaattgcaagataaggccatgtgtaagattttccctaaaactagaatatattaatgcatgtttgagaattttaaagcaccatggtcaaaaccagaagctatattttgcatatttggactcagccatccattaagaacccatgttgtcctctggacatatttatcaatataattgggttttaaatagtataaaagaaaacttgtgatctatataatttatgtatcaccttcattgtaaatttagcaggaaatgcatcacaattatgatttttttttttgcaccagtgaaacaataaagatgctattaacaattttggagctttttttcccctttcatactatctttaattgataaaaagtactagtagtatggctatagagtttaatagtcattctcatatattcacagagctcacttaactctagttttaagcacttgttgaacaaggcagcatctactcttttagtcatttataccccttttctttcctcaactttaccctgcttttcccaaggcatgatgaattcacataaaccccccaaaggctcaccaccgatactagttacctactatataataaaccatcccaaaacttactgtcttaaaacagcaaacatttatctcacaggtctctggatcaggaatttgggagcagcttagctggtggttctggcaaagagtgtggtgtaaggttgcaaacaagatactggttggggctgcagtcatctgatgctttgactggggctgacttttctgctcactgacctggctgttaggcagaggccccagttcctcttcttgagggcagaggccccagttcctctccttgagggcagaggcctaagttcctttccttgagggcagaggccccagttcctctccttgacggcccttccatagagtgtcctcacagcatggtggctggctttcccctgagtatgaaagcaagaaggaaaccacagtgcctttcagtggcctccctgtggaagtgacatgctcatttttgccttattctgtaagtggggagtcactaagtctagcctatattcaagggtaaggagaattaagctccacctcttaaagggaaaatttatagacattttcaaatgactacatcacttaacccctcaccatctgccctcccattgctagcacttgatgactagcccttgctgggctttacatgaacagatgtttcccaaagttataaaattagtaccactaaaatgtatcaaatgttaagccattctgtggtatgtcatagtccagcaaaccctttctgttctttgtaggtgttagtttaccccgtataaacctgattatggcttgacatgtccatattatttacatgttttgtgaaatacaactggaatagtagaaaagacatgagtcaagaacacttgagttggagagcttggtttgcaagtaaggtaatgtcagtacagtgtgtaaattatctcttattttctgggttgaggtaaacccaattttaaaaataataaaccaacaaaagtaaataaaagtgaaacaaaagcactgctagtatccttaacttacagattttttttgttgaacaaaaactgggtaccagatatagttaggcactgaatctaaaggtgaagaagatcatagcctctagcttcaagaacgttagtctgctgtgaagacagacctgtagttacagaagatggtaagggtttgtgcaggagagcagtgaagaagagctttgagggattggggatggggaagttctgcagagggttgtatgaattctcatggaacatcaagtccaatagtttatttagccttctgaggccagtgctttggcctgcagtcccaggctcctcagacccatgggctgaagcaagttatactcttggctgcctgtagtgaaatagatatttagaaattgacttagcatttaaaaccctttatagcaatttgacagagtaattttatgtctattggatgtaataaatatttggctttgtgctttgtg

SEQ ID NO: 303 - DNA, 6610 bp, Homo sapiens
gcggccgctgtcagtgccgcgagcgtacgttcggcgcgcgctgcgatcgctactgccagtgcttccgcggccgctgccaccctgtggacggcacgtgtgcctgcgagccgggctaccgcggcaagtactgtcgcgagccgtgccccgccggcttctacggcttgggctgtcgccgccggtaagcgcggtctctcggccagggagggaggaggtggaagggcgggccgccgatggggacaggggtgaggcgggtcccagccttccctagcctccgacccctcccccaggtgtggccagtgcaagggccagcagccgtgcacggtggccgagggccgctgcttgacgtgcgagcccggctggaacggaaccaagtgcgaccagccttgcgccaccggtttctatggcgagggctgcagccaccgctgtccgccatgccgcgacgggcatgcctgtaaccatgtcaccggcaagtgtacgcgctgcaacgcgggctggatcggcgaccggtgagcagccctgcctgcgtcggcccagacacgcagtcccccgccctgcctccctaacaaaggccccaatgtcgagggcgctgtggtccgtttgcctccatttctgctgacgcctcctcccctctttccaaggtgcgagaccaagtgtagcaatggcacttacggcgaggactgcgccttcgtgtgcgccgactgcggcagcggacactgcgacttccagtcggggcgctgcctgtgcagccctggcgtccacgggccccagtgagtgccccgggaccgggagggggttgggggcttgtacctgccacagaggggggtccagccgacgaggtggcctctccaccctgagctgggttatcacctcagccttggtcccttaccccagctagggagtgacagtaggctctttgggggcagtttcctgcctggatgtcggggagctcacgttcagcgcaggatctggtgaccagtccagcctgtgtcagtgggctcttaaggtgaccccgagttggtacagaaggaccagggacctccacttacagccaagggtctggttcagcagcccctcttcccacctagccgagtcagccccagcagtgggcgctgcggcgcggccaccacgggtcctatcccccaggcccccccactagtgttgtgcaacattcgtttccaaaacatccactacccaatatgtgccacgggcggggcggggcttcaatccctagacgacgaatgcagcgagagagagcccggttctgggaccctggaccctgggccctggccgcgggtgaggggtgagggtagggggcatcctaggggggcggctgtggcatgccttgaccctatgtcccggcagctgtaacgtgacgtgcccgcccggactccacggcgcggactgtgctcaggcctgcagctgccacgaggacacgtgcgacccggtcactggtgcctgccacctaggtaagtggatgaggggcgtcccgttaaggaatgcagggggtgccagaaaccgcgctgaccccataaccccctacagaaaccaaccagcgcaagggcgtgatgggcgcgggcgcgctgctcgtcctgctcgtctgcctgctgctctcgctgctcggctgctgctgcgcttgccgcggcaaggaccctacgcgccggtgagcccagatactgccccgctttcgcctgggttcaggccgcaccctctgggtgccaccggacccagatccaacccttccgcgcccctgccccggacgtggccccgccccttctgtgcttggctccggccgagatctaatcgcccctgggccccgccccggccccgcccctccgctcagaccccgcccccgcagggagctttcgcttgggaggaagaaggcgccgcaccgactatgcgggcgcttcagtcgcatcagcatgaagctgccccggatcccgctccggaggcagaaactacccaaagtcgtaggtaaggatgacagcgcggggtatctgggagaaacacctctcgacgcaggaagctgctgggaaatgggtgtgagggggtccagatctcagtgaggaaatgggggaccttgagtgttgatgtgcgtgggcgcgaggaggtgcgaccagagggaaggtaagaggtgtggcagctgctgagggcgaggcaaggtaggaaggcaggagtcctaggtgcgccggctgatgtgggcatatgtcagaaacgttggccctgagagtgatcgcatcaggggtgtgtggacatctgggtcccgcaggctcccccagtctgtaggagaatgctgtatatcccggccagagctgctgggggaatgcgtggccacgggagtgccctgccccacggagaggacccaccctcctgcctacatccccagcagtacccagagatcctcctggaaagtgggcaggctggtccccacccaccaacaggataggggggtggggtgtgccgcttctctccatgctgacttgcacctgggtggaccctctcttcctctctttcccacttatttctaaagatggaggggaagggggctcagactcttgggagatgaaggaaacagctgagaaaaccccttagccaagccgggcatggtggctcatgcctgtaatctcagcactttgggaggccgaggcaggtggatcacctgaggcctggagttcaagaccagcctgaccaacatggagaaacccggtctctactaaaaatacgaaagtagccgggtgtggtggcgcatgcctataatcccagctactctggaggctgaggcaagagaatcacttgaacctgggaggcagaggttgcagggaggcagaggttgcagtgagccgagatcgcaccattgcactccagcctgggcaacaagagcaaaactgtcaagaaaaaagagaagagaagagaggagaggagaggagaagagaagagaagagaaaagaagaaagagaaggaagggagggagggagggagggagggaggagaaaccccaaaactgtcgaaagaaaagaaaaagcaagcaagcaagagagagaaaaccccttggcccacctagcagcatggcatctggggacataggtgtggggagtggaccccacatccctctgtggaatggaggccaggctagccagcttctggggccccctgttgtggggtctgcatctctggaggccaggcctagggtgcagcttgctgagatgggctgagccaaagggcagccctgccactgcgcatttgggctcagaagtgctccaaggcttccttattcgcacaaggcagggcctaaaacagagcttggaggccttggtggcctgtcccagccaggtgtcttcttcagccccgtctcccacctttctggccttttctcaacacgtcagcccaaccttttccagctccctggatgcacacacttgccttgcaccttaacacatgttgtgcccatgtttcttttctgggttcacctctacccattctccagtcctggcccagtgtcactgtacctgttgagttgcctgtgccccctgcagtccaagaatagggctggtcttggtcaccccatcaacatttgtcacagcaggggctaatgagggcaccggctggggcagagtggacccctggcagctctgcctcatccttccccagtggcccaccacgacctggataacacactcaactgcagcttcctggagccaccctcagggctggagcagccctcaccatcctggtcctctcgggcctccttctcctcgtttgacaccactgatgaaggccctgtgtactgtgtaccccatgagggtaagtaaggccctacctgggcatcactccagcccagtgaaatgttcccatggaaaagctgtgttctgggtgggacacaggagaagggcaggcagcatggagaggaaggccttggccatgctggtacctgagggttgcccacagagctgaggccatagagctggactctgctgctcagtaccggagacaggtgtggggagatgggtaggccacagcccagggttgctcctgggggaaagtaggcagagagaagtttctgggcttaggtagggggtggcagaggagacaggaggaagggatccacagagtatgggagttggatccacacacagcctttgatccacagatagcagaaaggagcctgatggtctgggattctgccctgtctcctcccttgactgtgcccccagatgccacgggcaggtgaccaactcagagcctcagaagccttatcgctctttttttttttttgagacggagtctgcctctgtcacccaggctggagtgcagtggcatgatctccagtcactgcaacctctgcctcctgggttcaagcaattctcctgcctcagcctcccgagtagctgggattacaggcgcccacgaccacgcccagctaatttttgtatttttagtagagacagggtttcaccatattggccaggctggtctcaaactcctgacctcaggtgaccgcagcctcccaaagtgctgggattacaggcgtgagccaccacgcccagctagaagccttctctcttaaagaaggataatggaacccctgtggggatgttccagcctcaaattcgatgatgcaggcgcccaaggctggaggggtgttggggcagggctgccaggccaggccaaggttgggcttcagtcgcgggaatgcgcccatcactccttgcacagcctgagttcagagtcagccgcatagcctgaggctctgaagtacacatgtgtggttggtgctctgtgccaggcacgtctagatgccagggtgacacagtgccaagggcgtgggtagaggaggaaaggtgaaggtttgcgcctggaggttggagcccctaaaggtattcctgaaggctgtgaccgccctgctcttcccttgccagaggcaccagcggagagccgggaccccgaagtccccactgtccctgccgaggcgccggcgccgtcccctgtgcccttgaccacgccagcctccgccgaggaggcgatacccctccccgcgtcctccgacagcgagcggtcggcgtccagcgtggaggggcccggaggggctctgtacgcgcgcgtggcccgacgcgaggcccggccggcccgggcccggggcgagattgggggcctgtcgctgtcgccatcgcccgagcgcaggaaaccgccgccacctgaccccgccaccaagcctaaggtgtcctggatccacggcaagcacagcgccgctgcagctggccgtgcgccctcaccaccgccgccaggctccgaggccgcgcccagccccagcaagaggaaacggacgcccagcgacaaatcggcgcatacggtcgaacacggcagcccccggacccgcgacccaacgccgcgccccccggggctgcccgaggaggcgacagccctcgctgcgccctcgccgcccagggcccgagcgcgcgccgcgccccggcctcttggagcccacggacgccggcggtcccccgcgaagcgcgccgaggctgcctccatgttggccgctgacgtgcgcggcaagactcgcagcctgggccgcgccgaggtggccctgggcgcgcagggccccagggaaaagccggcgcccccacagaaagccaagcgctccgtgccgccagcctcgcccgcccgcgcgcccccagcgaccgaaaccccggggcctgagaaggcggcgaccgacttgcccgcgcctgagaccccccggaagaagacccccatccagaagccgccgcgcaagaagagccgggaggcggcgggcgagctgggcagggcgggcgcacccaccctgtagcaggctgtggctcgtccgcgcgcagctccctcagcttcgcagcgccgcccgccaccccacacctcccacgctaccgggcacgggcggcctcctattggccgggcaccgcgcggctagcggaggttgcgtctcattggctcaggtcctgcagccgctcctggattggagcagtgtgctctggcgggaagggcccatcccgttggtcgaggcctgacaggcgcttagcgggcgactccctccccattggccgagttatggagcgctccgaccagacagcgtctcattggccaaagatgggagggttccgcttaaagaccgcctcttactggccaggagtggacttggttagggctaccttctcattggttgcagccagaggcacttctgcccgggctgcctctcccccgctagggcctggtgcctctggctggaggctccctcccttggccgtcccaatagagcccggggctacttccactggccaggctcccgggcatctggttgaccccagcctggggaggagggctggtctccgctcctcaggggcttagtccgtcccaccccttcccttccctggcgccccgggcccaggcccctcagctgtcagctggttttgatggcctcccactgccccacacgccgcgggacctccaggggcgactctagtggcctgaggagatgtatttataggcccccagcagggctgctcccccctcggccggtgccccaggatgggctcctcccggcgggggcttggccaaagctttcttaataaaatgcctttcccctcat

SEQ ID NO: 304 - DNA, 6610 bp, Homo sapiens; identical to SEQ ID NO: 303

SEQ ID NO: 305 - DNA, 602 bp, Homo sapiens
tgcgaaggcaactccacgtgctcagagaacgaggtgtgcgtgaggcctggcgagtgccgctgccgccacggctacttcggtgccaactgcgacaccagtgagcgtggggtcgggccggtattggtcggtggggcggaatcctggagagatggggcggggtccaaggtggggcggggtcggatccgccttcggggcgggtccccagaggtggcggctggagtgcgggacgcgggcaggttccggctggctgggggcacctactcaagcaccggggccttccaccccctccgctcctcccctgcagagtgcccgcgccagttctggggccccgactgcaaggagctgtgtagctgccacccacacgggcagtgcgaggacgtgacaggccagtgtacttgtcacgcgcggcgctggggcgcgcgctgcgagcatgcgtgccagtgccagcacggcacgtgccacccccggagcggcgcgtgccgctgtgagtccggctggtggggcgcgcagtgcgccagcgcgtgctactgcagcgccacgtcgcgctgcgacccacagaccggcgcctgcctgtgccacgcaggctggtggggccgcagctg

SEQ ID NO: 306 - DNA, 602 bp, Homo sapiens
tgcgaaggcaactccacgtgctcagagaacgaggtgtgcgtgaggcctggcgagtgccgctgccgccacggctacttcggtgccaactgcgacaccagtgagcgtggggtcgggccggtattggtcggtggggcggaatcctggagagatggggcggggtccaaggtggggcggggtcggatccgccttcggggcgggtccccagaggtggcggctggagtgcgggacgcgggcaggttccggctggctgggggcacctactcaagcaccggggccttccaccccctccgctcctcccctgcagagtgcccgcgccagttctggggccccgactgcaaggagctgtgtagctgccacccacacgggcagtgcgaggacgtgacaggccagtgtacttgtcacgcgcggcgctggggcgcgcgctgcgagcatgcgtgccagtgccagcacggcacgtgccacccgcggagcggcgcgtgccgctgtgagcccggctggtggggcgcgcagtgcgccagcgcgtgctactgcagcgccacgtcgcgctgcgacccacagaccggcgcctgcctgtgccacgcaggctggtggggccgcagctg

SEQ ID NO: 307 - DNA, 161 bp, Homo sapiens
gccgccactccggcgcttcccaggccctgctcgcgagtccccaccccgattgcgcacccgcgacttcagcccgagggggcggggattttcttggagcgacgggacgcgacgccaatcgcgacgagggcttcgccccgtggcgcggtttgaaaatttgcggg

SEQ ID NO: 308 - DNA, 17107 bp, Homo sapiens
gctgatagctcgatgtgacggagtctcggattgcaaagacggggaggacgagtaccgctgtggtaaggtcatggctcttcccctggggaaacagaaggaagcagcagaagccaaccctgacccttcccatctgtataatgggtccaagtcattgccatttttaggtcatgtcctcagctgggattgaactggcgtttgcccaaagacatgttgggctggggggtcagggagggccttccatggagctctggctctcttggggagaccacataagcaataagatgagaccagcgagaagtctcagggatccagagtcactgctctgtgatggggaggctgccgtggacaagaagtgggtcagatttggcagaggaggggtttgagctggctgtggagaaacccctgcctatggtctcagggttccactggccactaataagcctttctttctgcacatcggccagtccgggtgggtggtcagaatgccgtgctccaggtgttcacagctgcttcgtggaagaccatgtgctccgatgactggaagggtcactacgcaaatgttgcctgtgcccaactgggtttcccaaggtaagttaaagagcatttccaacccatgggcaaaacacagagaggataacaataaagaaagacaactaccatttagttgggcactattgggtgctttaacgctctcagattacatcctcacatccaccttaggatgcccgatatcatcctcacttcacaggcaagcaaaccaaggccagacaggctaagtgacttgctcaaggcacatgggaagtggcatgtttgggggttcccagggccaggccaggatcggagatacgaacatgcaataaaaagtttcaaagtagaaaacaaaaacaaaaccaaaaaaccctccagctcctcagcttgcagctcctagagtagcttcctggacactttcctgcttggtcctggcggtcacatcaatgtccatgcacgcttccccaagaaccccacagaaccaattgttgaaagtcagaaatttagtgaagacacaatcatccaaaacacttgtttagcaacatgtagaacaaagaactataacagttgactattcactttttagtgtttgtgttgcctacatgattttttgcattggagtgacacagttttggcctaggcatgggcctccttctctcccctggccccttccttctgacttcctgcggccgctgtacttccacgggttcccctagcagcctccttactcccctttgctctcaagtctcagcactcaaagcaggcaggctgcattctgctttgcactcaagtagatggggtcgttaaagccacactgccctgagtcctccacagagtctcagttttcaaattccatgaatcatattctcggctgtctttccccaaagctggtggaagccaaaatgccctccagcctccagccctgaggtctgcctccctctccctccacaccaactgagattcagaaatgagctgcaattcaagttcaatgagaagagcaaaaatcatccacactaacgtcttcaggaatgatgtattactccttagagacaaggaggaagaggtacacacacacacacacacacacacactgcacacagctgagagcttccccattgggcatttctcttccccgctgagcctcttcctctgactcattgggtggggggtgttggggggcctccttttctcttctctctgccctcctcctctgtcctggaggaccaccgctctgtctgagcaaaccccaaggcctctctgctctgttatgcagaaaaactcagctcaatccctctccttccccacccagcagacccaagtcaggagccccagctgtcccaggcatcaggtagaggccactcatggtgggggtagccttcccgtctctcttccaccccagcccgtttggtaaaatattccttctcatccttaatatgctccctctacaaggaaatccagggaatgcgatgtcccccatctctcaccccaatattgcctactttcttctctataggcttgttcttttgttctctatccattgcttcagtttctaagatttatttctgcattttgttctattttcttaaattctccttaaaatccttctttaatcttctctgctctactacatcctatgtcagagatctgtgattcaaaaataaataaataaataaataaataaataaccaaaggacggtcaagctagattgcttgggttcaaatcccagtgtagactcaggcaagttccacacacagttcatgcctcagtttcctttcttagaaaagagggatgataatagcacgtacttggaggggaactgaagttccgctgacgctgtgagtgtggaagggcttggtgggcaagagcacactgggcgagtgtgtggttgtggctgtcattgttaccattttgagacttggacagttcatggggctccagttgcagcactggggtccccttgcctggcacaagccccgccacctgcactggggccaagccatcccagcaaccatcggctctttcatgccagtgccagcggaatccgtgcattgagcaatccctggaagggctgcgaaggtcgtgcccgccgccttgattacattttcctcaaaactcaaagttgactgaactttgtattctacatacacacccccatagcatttacagtaagctgaagaaatcctgttgataagctggtgtgttcactatgaaaacaagcctactgtactgtgttttgttcatttcacaagggaaggagaacatggctgtttattcaccatcttccatcttgtgactctccaaacatgtgattcttctttaaaaagttgcatcactttcaccactgttctccagaagacctgtgtcctggcactgtaaaaatgagctgggctctggtgttcgtggaatcgctttcttgtttgtgttcatctctttccagtggggctctgcgctggtcctgggcaggtgagggatgtctctcctgttcctccaactcactgttcttggagaacttggtgtccctgcttgggtgccccccgacaatactgcacctagttttgtgctcacctcccctctggacttgcttcaggccaagcaaaaggcatttcactggaatgcgcaaagagtgactcaaccaaggacataggagatggtcactcactgtgtggctgcagcccagggtgggtggacggggctgtcaggtacaggccagaagcgggggtcatcccagaacacagcaggcctggactgaatgccttgccagggtgagtgaacttcattctcttggcaaaggaagcctttgatgggtttggggggacaaaatgacatcccccatgtacaatccctgtaatattgtgactcgcacatcggttgaatgcttcaaagtgtaaagttaccacgtcgggtctgtctttccaatgtgcttgcagctatgtgagttcagataacctcagagtgagctcgctggaggggcagttccgggaggagtttgtgtccatcgatcacctcttgccagatgacaaggtgactgcattacaccactcagtatatgtgaggtaggtggtcaggcgatgctgttgtctgcacaggtatcgagtcacctgctggatttgtgatgctatgcacaactccacaaggacttaagaggcatgcatgtgttatctcagatggaaggtgggagttggccaccttgatgagactggtggatgcgccaggctgggggtgtgagaacctgagggagtatggcccaataaagaaagggaaggaaatagagtagaagggtaacaatgctgtgagtgtgaccaatgtactgtcatgtgacaggcactctgggtgtgtctggggaatgaaagcaggcaagcaagaaggggggtggggaggaaaagaggaagggagggagggagggaggaaggaagggagggagggaggaagagagggagggtaaaaggaagaaaaacagaaattaagatagaaatttatccttctttgtttacgaagtattttagcattcattatttattttacatgttttccccaacaactcatggggaaggtaaaaccaggtgttcttaaataaccaccaggtaactgaaacttacagggaccacatgccttgccccaggttagacggtgtgtagcagatacagccaagagttctgaatccaattccatattctctccctgacatctaggcccaaaccctaagatgtgcattttctgctctgggaacagtaggcttgttggtctgtccgtcggggatgaataagcaccccgggacccacctgcagtctggagggacagctcatgtgttgggtgctaaatccacagtctggtgacactagctttctcttgcatgatgagctggggctcaaaaggcagaaaacattacaaagattttgggatccctttcccttcactatgagaaaagcacacaccctggtctccacctgtgtgtgggggtgggggtaggagtgtcaattttggggcaatcacactttattgctctggggaaggagtcctctgccagatgtgtgaacccaggctacaaggagtcctagagagcttgccacgctgtcccttgggcactcttgtgtccctaggggccaggaggtggagaacattgggctgaatcgccatgcaatgacagcgtgacatgttgatagaatatatctccttacacatcctttatcactagctatctaaagcttagaaatacagaacggcctgttgtgtacacaatacttcactgttagttgagtgttttacaatgaattgtgtgacctcatcctcatggttttttttttttttgaacatagactaaaattgtaatctatattcaaagagggggaaatagaatttatttttctgttaccctaagattgagtttttaagagtgttcctttcacagatctggggcatttttcacagagcctactttttctccgctttagggagggatgtgcctctggccacgtggttaccttgcagtgcacaggtaagagttccagaaaggcaggggtccagggggagcaagcacatgctaagtcctatctccttgccctcagagtcctctccccccatggggctctgtatcccttcctcctgggtgccaggcgggaactctgtgtacccctacctgctggaggaggggagcagtgtcatcctcacctgtcggcctcacctgtcaggtgggggagacagccagagcaactcattagcagcggacaggaccaaggcccatgatgtcccatcactctgaagagccttgagtccctgactcagttcccacttcctccttacacgtgcacagtgcccactccaggcctcgggcagtgcccctcgttcctggcagaggggagtgttcacaccacaagggtggggtctggagcagtcagggaggtgcgtgcaccagcggcagtgaggagggggctgcagaaggttcctgcctgctcctgacatcccagggtgttgtcatcactgggggaataggatggggagtggtgctgccaatgctgggcactgaccaagcagggcaggtgcttttcccaccgcatcctccacagcacccaccatcctcaggtctccccaagagcctgaccacctcccctgctgagctcccccttgcagcacttgtcttagagctgctgtgagctctgggagcaggggcagtgagggtggggagagaggagcaggtgcatggtggtgacaccatgtcccccaaagaagtctgcagggtggacccacaagcttttgttcccctccatagcctgtggtcatagaaggggctacagctcacgcatcgtgggtggaaacatgtccttgctctcgcagtggccctggcaggccagccttcagttccagggctaccacctgtgcgggggctctgtcatcacgcccctgtggatcatcactgctgcacactgtgtttatgagtgagtgctgctgaccatcttcccagacccctgttcactcctgggtcatgtcagggtggggctgctttgggtggtgagaagcgggtccagagggaagacagagagactaacctccaagtaatgtacagttggagaggagtctccagcctcactgtggacccatcatcatcagctgggggtaacttgtgaccctgagcttgttttaaggattgtagctcctagagaaagggcagacagaagaggaaggaagctcctgtgctggaggaaacccacaaaaatgaaaggacctagaccttcccatagctaattccagtggaccatgttatggcagagacagggtgagacggtggtgcgggaggctagagggaatatgttgggggccaggtactgggtctcttcttaaaatctcaggagtttagagtgcaagaaaactacagaaaagacttccaaacacaatggttctccctgatatttttaccccctattttgttgctgtttgatgaacagtagtgcctgatagactccttgcagtgaccaatgttgagttcagccctcaaatgccaagacgacctcagaggtgctgagagtgaggtctgggaaacacatggggtgtgggtctgtgtttctgtagggcgtggcagtgcagttgcatatacagcataaacaagcagggtgatgggaccacatcttgcctgataacctctcccaccatcttcctaggttttcaggatacctgaggtcaatgagttcagtggttggacttttcctgtgcttcacctcttgctcttctcatttcagcttgtacctccccaagtcatggaccatccaggtgggtctagtttccctgttggacaatccagccccatcccacttggtggagaagattgtctaccacagcaagtacaagccaaagaggctgggcaatgacatcgcccttatgaagctggccgggccactcacgttcaatggtacatctgggtctctatgtggttctgcagctcttcctttgtttcaagaggatttgcaattgctcattgaagcattcttatgatggctgctttataatccttgtcagatattaataattccaactcctgattcatgttggtgttggcatcagttgattatcttttctcattaaaattgtgatgctcctagctcttggtatgacaagtgattttcaattgtatcctggacaatgtggctctcatgtttgcagacttgagtcctacctacattttcaatgttaccctgtttaaatgtagtttgtagatcctggcctacagaatgaatgcactgatgactctgccaggtagattggtgggctgtagttccaacaataattttagagccttcgtgggctgtgtgctttgtctggtgccaccttctccctgttggtgccaccttctccctgttggtgccacctggatgcagaaagagcttcttgaggccagaccagctggggcctctaggtggtggaagagagtcatccatctgtagggacaaagagcactttcctgtccaggagcctattgtggaggggtcactcagccagtgcctcccacctgcctggtttctccaggtagaggggccatcttggttgagaaacagaacctcccaggctggccaggtggtgtggtggagtcctctcatttctttacaagctgaaagatgctgggcaccctcagctccctggaagtacagaaaagttctctcccaaccagcagctcctaaagaccctgtttcttgaaaaagtcaagccctgccctctggacattacgaaaatgccagaagagccacacctgataaaactttcaaacatctcgtagatgcaaacaaagtactaggagactactcccaattaaattaaagccctctttccttcttaagaaagcagggaaagcataataaataggttaattccctcttattgaagcagaatcctgacctgagaccagctgcaggctctacctggcagagtcattactgcatccatcacatggacacgtaatgcccagaaacaaatatttccagagaagcaggaaaatgattatggtggtgccagtctgccaactattattaatgatattggttataggaaatgaggtgccagcacttgtactttgccaaagtttcaagtgagttcttttattccttctctacctctccattactgttctgcacagaaaagctcggggaacctcagggtgtgttcacacgaaagcccgaggtatgtgcagggcactctggctttgggggaggcccacaggatccagccctacacacaggcaaactcgtcgcctccagatatcccaggaaccatagcaatattcatggagccgtgttctataggcaacacccacactgtgatctagccaggagtgggcacgcgttggcctgagagcctggtctgccccatcgtgttttggtaaatagacattttactggacacagccacacctatgtgggtacctgttacctggggctgtcttcatgctccaatggcagccagagaccgcacagcccacgaagcctacaacattgactattcagccctttccacaaaaggtgtgctgaccctggtctaggttccctcacgctgcgacggtggagggctcttttacagttttaagtgctctgggtgtggtggatggggtaaggggctcctgctgtgagctgatcgttttcaagtaaccaagggcttgaccttccttcccttgggagatagtttgggctcctcagaggcagaagcatagatgagattgttttctcggactcctgcttcaattgagttgtgaactattgtttcccttcaagcagaaatgatccagcctgtgtgcctgcccaactctgaagagaacttccccgatggaaaagtgtgctggacgtcaggatggggggccacagaggatggaggtcagtgggctgaagccaagattcggagtccaggggctcagaacccagagggctgcggagggggctcccccaatgtcccattgtgatgttcccatgggctgcccagataccccggccagggagtgcatgtcagctgctcgggacacagtcagccaaggaactgtgggtcaggagtcacggttccattgttatggggacaacatgaccctgcagaccttctcaggagagagttagaccttctcgaacacagcaggtgtttccctttccctgcccggacccccggccttgttaactgaggacatacagagcccacctagacaaccctcccaggcttcattcagaactcaaagattcgtatttgtgaagactctttgtcttgtgggactttggaagatgtgttctttcatcctacaaagagcaagtggaagcagcagcagatgagatcgctgtaataataagggaagtaggagtggcagtaaccatagtccatgcaaatgaagcccgggccaccctttccttagtgtgggtacagagctggtcatgagtcttaggtttttccatcaatcactttctttgttagtaggaagaggattcattttccgtggctgccgtgacaaattatcacagtctgcgtggcttaaaacgatggaaattggccaggtgtgttccctcacacctgtagtcccagcattttgggaggccgagtctatgggatcccttgaggccattagtttgagaccagcctgggcaacatagagagacaccgtctctacaaaaaatacaaaaattagccaggcatggtggcatgcacctgtaatcccagcactttgggaggccaaggcaggaggattgcttgagcccaggagtttgagaccagcctgggcaacatggcaagaccctgtctctacaaaaaattaaaaaaattagcctgggccgggtgcagtggttcatgcctgtaatcccagcactttgggaggccgaggcaagtggaccatttgaggttcaggagtttgagaccagcttggccaatgtggtgagaccctgtctctactaaaaatacaaaaattagccaggcatggtggcgcacacctgtaatcccagctattcaggagactgaggctgtagaatcacttgaacctaggaggcggaggttgcagtgagccgagatcatgccactccactccagcttgggtgacagagcaaggctccatctcaaaacaaacaaacaaacaaacaaacaaacaaacaaaaattagcctgacatggtggtcccagctactcaggaggctggggtgggattgcttgagcccaggaattctaagctgcagtgagccgtgatcatgccatcatactccatcctgggtgacagagtgagactttgcgtttaaaaaaacaaaacaaaacaaaaaaaaagtggagatttatttccacacgcagttgaggtgtctgtagggtggttttcctggaggctctgacccctttcctttgggttctggtggcggcggctgcagctgcactggcattcctgggcttgtagctggatctccagcctcagcctccttcctcccgtggctttgccccctgtgtctctgtatctcaaacttccctctcctgtgtcttataaggacagcaagtcgttggatttagggtccaccctaaacgctgggagatcttatgttgagattcttaccttaattacatctgcaaagaccctgttccaaataaggttgggctccatagtggcaggtaggcatattttggaggggcccacagttcaacctaacacaggaatttcagtgttttccactcaacaccaattacttgagcccacccccagctgaaggcacccaggagctaacccggatgcttcgagtctgtgggcctacttaccccccacccactggcagtgctgcccacctggccgagggcactcacagctctctgtagtttccaacccacccacatggcccaggcccagttctgtgccagtgtggctggtccagggcctttctagcttcatcagaaccagcacccctggtgtgtggtgggagctgggacaccaatctacgctccccttcctctcatggtgggctctcattccggaccaaccagcccaccagagtcattctgatgacactgggctctgaagaggaggctgtgcaacagcttcatcctcccaggagattctccatcccgctgccgattttcttctcgctgtcaatctgctctgtccagtgcaaaaggtccgacgagcccctgtcctgatgtagcttcagctccagcctgtcctggaatcttctcccataatgcattgagctgtttcgccacgttccgggcaggaagctgagtgtcttgtgataccatgtgctcctcagagcagcccctcagggtcctgtcattgtgtgattttgttgtctccatggaatctatggagtctttaaaacaccaagatgcctgggtcacaaaccagctgagttggaggggtccatccctcggtgtcgggggcgtgcttggcccactgcacgtggattaagtctcctgtgactgttgcaacaaacgaccccaaattcgtggcttaaaatgacagaaaggtatcatctcatagttaggaaggtcacaggtccaaactcagtctcagggcgctggcgtcaagtgtgggctgtgctggctcctcctggaggcccttggggaatctgtctcctgcctttcccagcgtctgcactctgcccacactgcttggctcgtgcccctccttggtcttccggggcagcaatgccgcatcttcgaatctctctctgactctctgactctggtccctgctctgtcgtcacagcttctcctccggctcctccaaagacccctgtgacttcgtcaggtccaccctcttacttgggatcatctccccactcaaggcctgtccctcaatgcacctgcaatgtcccatttgccctgtaaggtgacacagtcacaggttctggggattggggtgagaatgtctttggggtcatttttctgctgaccatcccagagttcacaaagacgctgagtgagtgaccctcctgagcctcagtttccctcccataacctggggtgttctgatggctgattgggctggtgccctggggaggtgtcttggccactgttgcccctactcctcctcctctttggacaccttaggggagtcggtggccctgccttgaagcagactggccccttgcggccactcgtaggagggcaagctcgggcttgaggtgcttcgagacagtgggagtctgctcgtcccacccgcagggccctgtccttttccgctgttgcgacacaccagagagcatccccctcgtccctcgttccctcacccccctggtctcagcatgcgccttctgtgttttgggccgggcttccttctcacacacatcccctcactcactttgaagcaggtgacgcctcccctgtcctgaaccacgcggccgtccctttgatttccaacaagatctgcaaccacagggacgtgtacggtggcatcatctccccctccatgctctgcgcgggctacctgacgggtggcgtggacagctgccaggtacggggccgcagcggtgggcgaggccgtggcagggtgacccagcccttgggacaggtcgttgccagcgtttccctgtgacaggacaaaaagtaaatttacagggcgtggagaagaaatttgctcaagatatcactccttttcctggctgccagccctgtgtttacccagtgatctggctctgcgtgggtgctgggtggtgggaggggactcatgctgctcccctccaattctgactttgtgggggaccacaggggaggcaggtggtggggaggcaggtggcggggaaccagtgaatctggccctccgaaagctgcagtggctgggactccagttctactaggtggatcacaggtcacctgagggccctggccaggtggaccctccctctcaccagctgcccttgagcttcagagggtcagggtctgcattctggaagggacacacagctggaggcagcaccccaaaggggccgagggacatcctcccttggggatgctgtgtctggaagggctggtgggttcccttctgtaacctgggtcatccattgggacatcatgaaggggggtcccaactccatagcaagcagcctcacacggcagactgtccacagaaagcaatctcgcatggcggtgactgtcccccaatctttgcttctttcctgtcacccagggggacagcggggggcccctggtgtgtcaagagaggaggctgtggaagttagtgggagcgaccagctttggcatcggctgcgcagaggtgaacaagcctggggtgtacacccgtgtcacctccttcctggactggatccacgagcagatggaggtgggtgcggcgccctccccagctcacgttgtccctggcttttgaccctaaggtcccttaaatgcaaccctggtcttgctataaaaaccagggcgtgacccagtggttgtcaattcagcagcagtgacttggtggctccagggtgtcagacgcttgtgctgaaaacagagatcacagctagtcctgggcagctctgggtgggtgcagcctggcaggcagaggagctggggcccgggaggaagaaggagcctcacgacatgggaaaggaggaggcagcgaggaggagcccctgctgggatggggatgggtcgggcgtgccccgtgtgccaggagcagggagaaagtgggagggggcggggggctgagacagtgcgggagaggaccttgcctgcctgctgaggggctggaacctcgctgggagccagggatgagaggcagcagtcaggagaggcttggggagctctgcattggtggtgtgggggggtggggggtcccggagggggaggcgtggaagtgggaggggcctgcaggggggcacccaacagcgaggctggcttggcaggacccgggcatggaggggaaacctgagacggtggaggaggaagaaggaggcttagggcttcgctgggaccctggcagctgcgtgctggcaggtgaacacggcgcctttctcatgtgggcgccggggaaacatttgctggcttgatctcagatgaagtctctccttgggatggtttcaaacacaggaggtcctcacttaatacggttgatgggatcttagaaactgcagctttaggagaaacagtgcgcacaggccctccagcaacgtccttgcttgcaatgtaattttgttataaagtcgatgagaaaaaaaaaattggtttcattatatatcattttgcttaaagtcgtagtttccaagaactaacaatgacgtcaaagtaagtacgttttttttccctaattcaagtgaaatttatataacatacaattcaccattttaaagtgaacaaccctgtagcatcagcacattcacagggctgtgcagacaccacctttgtcagttcccagcattctcatctcccaaaagacacgcggcaccctagaagcacgcagttactccccactccacttttctccccagcctctggcacccaccagtcagctttctgtctccaaggctcaaagacctttttaaaaagctcatttaatttgaaacaattggccaagaaaggacatcaaatgctgaatgtgcctcaggcgttaattcccgttttgctctcactgattttgtgctttaaatgagaaactaaagaatggtgcccacgggcacagggtgaggcctgggactgagacctgggctagcttcacctccagcactgccgccctgcagccctgagcaccccctcggggcgtggtgagggctgtgctcgggctgggtggaaagtgcttgctcctgctcaccttgctgggagaggcagcctggccccatactaggcactgagtggcctgctatgctcttcagtataaagctcagcccagcccgcccgcactgtagaaaggaccaggatggacaactgaatgggagacctcctcactgttcagggtgctgtgggagcctggggggcacagaagggtcgcgtgggcacagagggcaaagggcaggaaaggagaagccggtcctccacacgggtctgcagtacatggaggccttcacgggacacagatccccaggggctgagcactgagctggtgatcctaaaagtcccccttaagacactgaaggcgcaaggcagagaagcccaccgccgtgtcttccagctgtcgtgggtgagctggagacaaacgttcaaaatcagtctggggagcccgctcacaacggttccatgacggggccacctcagcccctcccatgtcagcaccgtcctgggccacagagcctgtgaccctccctgtactacagcggagacgacctgcatgaggcccccccagctaacaagggcagagtgtgcctcacatcagatccccgacgtggccccagtgtgactgcacggcagaatcaacagatctcaaacttaggggtgcagaagcctctctcaggctgtttgttaaatgtgaagattgcagggcgtttatctggagtctgattgggaggtctggggtgaagaccctggtgaatgtgttgcatgggggcttcagggcacactgagaaaccctgggagggtcttggaggcagtttcccctgttgtggtgaagctgtggtggaggagctcgtctgtgacgctggctccggcgatgcctggggcccctgctccctgcacaacgccttagtcatccgctgcctccaacccaccagtgcatgcgagagatgcgcagcctcagacacgccctttcccaagtccctcttcagacgtcctaggggagacccagaagagacttcctttcctgggaggctttccagcaggcccgctgtgcgtttcagttgtccattgtgaggaaagtcaacgtgagggcctttggaagactcactgtcttgcggggaagtgtcccgtgtgctagttggtggcatgcccatggcctcatcttcattttcatccagcacttttctctatctagttgggggtttaaaacaaaattgttgtgactcaaaccagaactcaggaacatagtgccgagacctggaagtttcctacggaagtgacggaactgtcgcagggcggagatgggacctgcggatgcattgctggttggagcttttcatgcctgcctgggatccactcagagctggcagccccagggggaggccaaccttgtcttcatcgtggagaacagccccacaattcccacagggcaaaatgcaggtgcccgctccgtcatcatgttggacggatggctggaagtgctaaaaacaataacgcctttgttttcatttatagagagacctaaaaacctgaagaggaaggggacaagtagccacctgagttcctgaggtgatgaagacagcccgatcctcccctggactcccgtgtaggaacctgcacacgagcagacacccttggagctctgagttccggcaccagtagcaggcccgaaagaggcacccttccatctgattccagcacaaccttcaagctgctttttgttttttgtttttttgaggtggagtctcgctctgttgcccaggctggagtgcagtggcgaaatccctgctcactgcagcctccgcttccctggttcaagcgattctcttgcctcagcttccccagtagctgggaccacaggtgcccgccaccacacccaactaatttttgtatttttagtagagacagggtttcaccatgttggccaggctgctctcaaacccctgacctcaaatgatgtgcctgcttcagcctcccacagtgctgggattacaggcatgggccaccacgcctagcctcacgctcctttctgatcttcactaagaacaaaagaagcagcaacttgcaagggcggcctttcccactggtccatctggttttctctccagggtcttgcaaaattcctgacgagataagcagttatgtgacctcacgtgcaaagccaccaacagccactcagaaaagacgcaccagcccagaagtgcagaactgcagtcactgcacgttttcatctctagggaccagaaccaaacccaccctttctacttccaagacttattttcacatgtggggaggttaatctaggaatgactcgtttaaggcctattttcatgatttctttgtagcatttggtgcttgacgtattattgtcctttgattccaaataatatgtttccttccctcattg

SEQ ID NO: 309 - DNA, 17104 bp, Homo sapiens
gctgatagctcgatgtgacggagtctcggattgcaaagacggggaggacgagtaccgctgtggtaaggtcatggctcttcccctggggaaacagaaggaagcagcagaagccaaccctgacccttcccatctgtaaaatgggtccaagtcattgccatttttaggtcatgtcttcagctgggattgaactggcgtttgcccaaagacatgttgggctggggggtcagggagggccttccatggagctctggctctcttggggagaccacataagcaataagatgagaccagcgagaagtctcagggatccagagtcactgctctgtgatggggaggctgccgtggacaagaagtgggtcagatttggcagaggaggggtttgagctggctgtggagaaacccctgcctatggtctcagggttccactggccactaataagcctttctttctgcacatcggccagtccgggtgggtggtcagaatgccgtgctccaggtgttcacagctgcttcgtggaagaccatgtgctccgatgactggaagggtcactacgcaaatgttgcctgtgcccaactgggtttcccaaggtaagttaaagagcatttccaacccatgggcaaaacacagagaggataacaataaagaaagacaactaccatttagttgggcactattgggtgctttaacgctctcagattacatcctcacatccaccttaggatgcccgatatcatcctcacttcacaggcaagcaaaccaaggccagacaggctaagtgacttgctcaaggcacatgggaagtggcatgtttgggggttcccagggccaggccaggatcggagatacgaacatgcaataaaaagtttcaaagtagaaaacaaaaacaaaaccaaaaaaccctccagctcctcagcttgcagctcctagagtagcttcctggacactttcctgcttggtcctggcggtcacatcaatgtccatgcacgcttccccaagaaccccacagaaccaattgttgaaagtcagaaatttagtgaagacacaatcatccaaaacacttgtttagcaacatgtagaacaaagaactataacagttgactattcactttttagtgtttgtgttgcctacatgattttttgcattggagtgacacagttttggcctaggcatgggcctccttctctcccctggccccttccttctgacttcctgcggccgctgtacttccacgggttcccctagcagcctccttactcccctttgctctcaagtctcagcactcaaagcaggcaggctgcattctgctttgcactcaagtagatggggtcgttaaagccacactgccctgagtcctccacagagtctcagttttcaaattccatgaatcatattctcggctgtctttccccaaagctggtggaagccaaaatgccctccagcctccagccctgaggtctgcctccctctccctccacaccaactgagattcagaaatgagctgcaattcaagttcaatgagaagagcaaaaatcatccacactaacgtcttcaggaatgatgtattactccttagagacaaggaggaagaggtacacacacacacacacacacacacactgcacacagctgagagcttccccattgggcatttctcttccccgctgagcctcttcctctgactcattgggtggggggtgttggggggcctccttttctcttctctctgccctcctcctctgtcctggaggaccaccgctctgtctgagcaaaccccaaggcctctctgctctgttatgcagaaaaactcagctcaatccctctccttccccacccagcagacccaagtcaggagccccagctgtcccaggcatcaggtagaggccactcatggtgggggtagccttcccgtctctcttccaccccagcccgtttggtaaaatattccttctcatccttaatatgctccctctacaaggaaatccagggaatgcgatgtcccccatctctcaccccaatattgcctactttcttctctataggcttgttcttttgttctctatccattgcttcagtttctaagatttatttctgcattttgttctattttcttaaattctccttaaaatccttctttaatcttctctgctctactacatcctatgtcagagatctgtgattcaaaaataaataaataaataaataaataaataaccaaaggacggtcaagctagattgcttgggttcaaatcccagtgtagactcaggcaagttccacacacagttcatgcctcagtttcctttcttagaaaagagggatgataatagcacgtacttggaggggaactgaagttccgctgacgctgtgagtgtggaagggcttggtgggcaagagcacactgggcgagtgtgtggttgtggctgtcattgttaccattttgagacttggacagttcatggggctccagttgcagcactggggtccccttgcctggcacaagccccgccacctgcactggggccaagccatcccagcaaccatcggctctttcatgccagtgccagcggaatccgtgcattgagcaatccctggaagggctgcgaaggtcgtgcccgccgccttgattacattttcctcaaaactcaaagttgactgaactttgtattctacatacacacccccatagcatttacagtaagctgaagaaatcctgttgataagctggtgtgttcactatgaaaacaagcctactgtactgtgttttgttcatttcacaagggaaggagaacatggctgtttattcaccatcttccatcttgtgactctccaaacatgtgattcttctttaaaaagttgcatcactttcaccactgttctccagaagacctgtgtcctggcactgtaaaaatgagctgggctctggtgttcgtggaatcgctttcttgtttgtgttcatctctttccagtggggctctgcgctggtcctgggcaggtgagggatgtctctcctgttcctccaactcactgttcttggagaacttggtgtccctgcttgggtgccccccgacaatactgcacctagttttgtgctcacctcccctctggacttgcttcaggccaagcaaaaggcatttcactggaatgcgcaaagagtgactcaaccaaggacataggagatggtcactcactgtgtggctgcagcccagggtgggtggacggggctgtcaggtacaggccagaagcgggggtcatcccagaacacagcaggcctggactgaatgccttgccagggtgagtgaacttcattctcttggcaaaggaagcctttgatgggtttggggggacaaaatgacatcccccatgtacaatccctgtaatattgtgactcgcacatcggttgaatgcttcaaagtgtaaagttaccacgtcgggtctgtctttccaatgtgcttgcagctatgtgagttcagataacctcagagtgagctcgctggaggggcagttccgggaggagtttgtgtccatcgatcacctcttgccagatgacaaggtgactgcattacaccactcagtatatgtgaggtaggtggtcaggcgatgctgttgtctgcacaggtatcgagtcacctgctggatttgtgatgctatgcacaactccacaaggacttaagaggcatgcatgtgttatctcagatggaaggtgggagttggccaccttgatgagactggtggatgcgccaggctgggggtgtgagaacctgagggagtatggcccaataaagaaagggaaggaaatagagtagaagggtaacaatgctgtgagtgtgaccaatgtactgtcatgtgacaggcactctgggtgtgtctggggaatgaaagcaggcaagcaagaaggggggtggggaggaaaagaggaagggagggagggagggaggaaggaagggagggagggaggaagagagggagggtaaaaggaagaaaaacagaaattaagatagaaatttatccttctttgtttacgaagtattttagcattcattatttattttacatgttttccccaacaactcatggggaaggtaaaaccaggtgttcttaaataaccaccaggtaactgaaacttacagggaccacatgccttgccccaggttagacggtgtgtagcagatacagccaagagttctgaatccaattccatattctctccctgacatctaggcccaaaccctaagatgtgcattttctgctctgggaacagtaggcttgttggtctgtccgtcggggatgaataagcaccccgggacccacctgcagtctggagggacagctcatgtgttgggtgctaaatccacagtctggtgacactagctttctcttgcatgatgagctggggctcaaaaggcagaaaacattacaaagattttgggatccctttcccttcactatgagaaaagcacacaccctggtctccacctgtgtgtgggggtgggggtaggagtgtcaattttggggcaatcacactttattgctctggggaaggagtcctctgccagatgtgtgaacccaggctacaaggagtcctagagagcttgccacgctgtcccttgggcactcttgtgtccctaggggccaggaggtggagaacattgggctgaatcgccatgcaatgacagcgtgacatgttgatagaatatatctccttacacatcctttatcactagctatctaaagcttagaaatacagaacggcctgttgtgtacacaatacttcactgttagttgagtgttttacaatgaattgtgtgacctcatcctcatggttttttttttttttgaacatagactaaaattgtaatctatattcaaagagggggaaatagaatttatttttctgttaccctaagattgagtttttaagagtgttcctttcacagatctggggcatttttcacagagcctactttttctccgctttagggagggatgtgcctctggccacgtggttaccttgcagtgcacaggtaagagttccagaaaggcaggggtccagggggagcaagcacatgctaagtcctatctccttgccctcagagtcctctccccccatggggctctgtatcccttcctcctgggtgccaggcgggaactctgtgtacccctacctgctggaggaggggagcagtgtcatcctcacctgtcggcctcacctgtcaggtgggggagacagccagagcaactcattagcagcggacaggaccaaggcccatgatgtcccatcactctgaagagccttgagtccctgactcagttcccacttcctccttacacgtgcacagtgcccactccaggcctcgggcagtgcccctcgttcctggcagaggggagtgttcacaccacaagggtggggtctggagcagtcagggaggtgcgtgcaccagcggcagtgaggagggggctgcagaaggttcctgcctgctcctgacatcccagggtgttgtcatcactgggggaataggatggggagtggtgctgccaatgctgggcactgaccaagcagggcaggtgcttttcccaccgcatcctccacagcacccaccatcctcaggtctccccaagagcctgaccacctcccctgctgagctcccccttgcagcacttgtcttagagctgctgtgagctctgggagcaggggcagtgagggtggggagagaggagcaggtgcatggtggtgacaccatgtcccccaaagaagtctgcagggtggacccacaagcctttgttcccctccatagcctgtggtcatagaaggggctacagctcacgcatcgtgggtggaaacatgtccttgctctcgcagtggccctggcaggccagccttcagttccagggctaccacctgtgcgggggctctgtcatcacgcccctgtggatcatcactgctgcacactgtgtttatgagtgagtgctgctgaccatcttcccagacccctgttcactcctgggtcatgtcagggtggggctgctttgggtggtgagaagcgggtccagagggaagacagagagactaacctccaagtaatgtacagttggagaggagtctccagcctcactgtggacccatcatcatcagctgggggtaacttgtgaccctgagcttgttttaaggattgtagctcctagagaaagggcagacagaagaggaaggaagctcctgtgctggaggaaacccacaaaaatgaaaggacctagaccttcccatagctaattccagtggaccatgttatggcagagacagggtgagacggtggtgcgggaggctagagggaatatgttgggggccaggtactgggtctcttcttaaaatctcaggagtttagagtgcaagaaaactacagaaaagacttccaaacacaatggttctccctgatatttttaccccctattttgttgctgtttgatgaacagtagtgcctgatagactccttgcagtgaccaatgttgagttcagccctcaaatgccaagacgacctcagaggtgctgagagtgaggtctgggaaacacatggggtgtgggtctgtgtttctgtagggcgtggcagtgcagttgcatatacagcataaacaagcagggtgatgggaccacatcttgcctgataacctctcccaccatcttcctaggttttcaggatacctgaggtcaatgagttcagtggttggacttttcctgtgcttcacctcttgctcttctcatttcagcttgtacctccccaagtcatggaccatccaggtgggtctagtttccctgttggacaatccagccccatcccacttggtggagaagattgtctaccacagcaagtacaagccaaagaggctgggcaatgacatcgcccttatgaagctggccgggccactcacgttcaatggtacatctgggtctctatgtggttctgcagctcttcctttgtttcaagaggatttgcaattgctcattgaagcattcttatgatggctgctttataatccttgtcagatattaataattccaactcctgattcatgttggtgttggcatcagttgattatcttttctcattaaaattgtgatgctcctagctcttggtatgacaagtgattttcaattgtatcctggacaatgtggctctcatgtttgcagacttgagtcctacctacattttcaatgttaccctgtttaaatgtagtttgtagatcctggcctacagaatgaatgcactgatgactctgccaggtagattggtgggctgtagttccaacaataattttagagccttcgtgggctgtgtgctttgtctggtgccaccttctccctgttggtgccaccttctccctgttggtgccacctggaggcagaaagagcttcttgaggccagaccagctggggcctctaggtggtggaagagagtcatccatctgtagggacaaagagcactttcctgtccaggagcctattgtggaggggtcactcagccagtgcctcccacctgcctggtttctccaggtagaggggccatcttggttgagaaacagaacctcccaggctggccaggtggtgtggtggagtcctctcatttctttacaagctgaaagatgctgggcaccctcagctccctggaagtacagaaaagttctctcccaaccagcagctcctaaagaccctgtttcttgaaaaagtcaagccctgccctctggacattacgaaaatgccagaagagccacacctgataaaactttcaaacatctcgtagatgcaaacaaagtactaggagactactcccaattaaattaaagccctctttccttcttaagaaagcagggaaagcataataaataggttaattccctcttattgaagcagaatcctgacctgagaccagctgcaggctctacctggcagagtcattactgcatccatcacatggacacgtaatgcccagaaacaaatatttccagagaagcaggaaaatgattatggtggtgccagtctgccaactattattaatgatattggttataggaaatgaggtgccagcacttgtactttgccaaagtttcaagtgagttcttttattccttctctacctctccattactgttctgcacagaaaagctcggggaacctcagggtgtgttcacacgaaagcccgaggtatgtgcagggcactctggctttgggggaggcccacaggatccagccctacacacaggcaaactcgtcgcctccagatatcccaggaaccatagcaatattcatggagccgtgttctataggcaacacccacactgtgatctagccaggagtgggcacgcgttggcctgagagcctggtctgccccatcgtgttttggtaaatagacattttactggacacagccacacctatgtgggtacctgttacctggggctgtcttcatgctccaatggcagccagagaccgcacagcccacgaagcctacaacattgactattcagccctttccacaaaaggtgtgctgaccctggtctaggttccctcacgctgcgacggtggagggctcttttacagttttaagtgctctgggtgtggtggatggggtaaggggctcctgctgtgagctgatcgttttcaagtaaccaagggcttgaccttccttcccttgggagatagtttgggctcctcagaggcagaagcatagatgagattgttttctcggactcctgcttcaattgagttgtgaactattgtttcccttcaagcagaaatgatccagcctgtgtgcctgcccaactctgaagagaacttccccgatggaaaagtgtgctggacgtcaggatggggggccacagaggatggaggtcagtgggctgaagccaagattcggagtccaggggctcagaacccagagggctgcggagggggctcccccaatgtcccattgtgatgttcccatgggctgcccagataccccggccagggagtgcatgtcagctgctcgggacacagtcagccaaggaactgtgggtcaggagtcacggttccattgttatggggacaacatgaccctgcagaccttctcaggagagagttagaccttctcgaacacagcaggtgtttccctttccctgcccggacccccggccttgttaactgaggacatacagagcccacctagacaaccctcccaggcttcattcagaactcaaagattcgtatttgtgaagactctttgtcttgtgggactttggaagatgtgttctttcatcctacaaagagcaagtggaagcagcagcagatgagatcgctgtaataataagggaagtaggagtggcagtaaccatagtccatgcaaatgaagcccgggccaccctttccttagtgtgggtacagagctggtcatgagtcttaggtttttccatcaatcactttctttgttagtaggaagaggattcattttccgtggctgccgtgacaaattatcacagtctgcgtggcttaaaacgatggaaattggccaggtgtgttccctcacacctgtagtcccagcattttgggaggccgagtctatgggatcccttgaggccattagtttgagaccagcctgggcaacatagagagacaccgtctctacaaaaaatacaaaaattagccaggcatggtggcatgcacctgtaatcccagcactttgggaggccaaggcaggaggattgcttgagcccaggagtttgagaccagcctgggcaacatggcaagaccctgtctctacaaaaaattaaaaaaattagcctgggccgggtgcagtggttcatgcctgtaatcccagcactttgggaggccgaggcaagtggaccatttgaggttcaggagtttgagaccagcttggccaatgtggtgagaccctgtctctactaaaaatacaaaaattagccaggcatggtggcgcacacctgtaatcccagctattcaggagactgaggctgtagaatcacttgaacctaggaggcggaggttgcagtgagccgagatcatgccactccactccagcttgggtgacagagcaaggctccatctcaaaacaaacaaacaaacaaacaaacaaacaaaaattagcctgacatggtggtcccagctactcaggaggctggggtgggattgcttgagcccaggaattctaagctgcagtgagccgtgatcatgccatcatactccatcctgggtgacagagtgagactttgcgtttaaaaaaacaaaacaaaacaaaaaaaaagtggagatttatttccacacgcagttgaggtgtctgtagggtggttttcctggaggctctgacccctttcctttgggttctggtggcggcggctgcagctgcactggcattcctgggcttgtagctggatctccagcctcagcctccttcctcccgtggctttgccccctgtgtctctgtatctcaaacttccctctcctgtgtcttataaggacagcaagtcgttggatttagggtccaccctaaacgctgggagatcttatgttgagattcttaccttaattacatctgcaaagaccctgttccaaataaggttgggctccatagtggcaggtaggcatattttggaggggcccacagttcaacctaacacaggaatttcagtgttttccactcaacaccaattacttgagcccacccccagctgaaggcacccaggagctaacccggatgcttcgagtctgtgggcctacttaccccccacccactggcagtgctgcccacctggccgagggcactcacagctctctgtagtttccaacccacccacatggcccaggcccagttctgtgccagtgtggctggtccagggcctttctagcttcatcagaaccagcacccctggtgtgtggtgggagctgggacaccaatctacgctccccttcctctcatggtgggctctcattccggaccaaccagcccaccagagtcattctgatgacactgggctctgaagaggaggctgtgcaacagcttcatcctcccaggagattctccatcccgctgccgattttcttctcgctgtcaatctgctctgtccagtgcaaaaggtccgacgagcccctgtcctgatgtagcttcagctccagcctgtcctggaatcttctcccataatgcattgagctgtttcgccacgttccgggcaggaagctgagtgtcttgtgataccatgtgctcctcagagcagcccctcagggtcctgtcattgtgtgattttgttgtctccatggaatctatggagtctttaaaacaccaagatgcctgggtcacaaaccagctgagttggaggggtccatccctcggtgtcgggggcgtgcttggcccactgcacgtggattaagtctcctgtgactgttgcaacaaacgaccccaaattcgtggcttaaaatgacagaaaggtatcatctcatagttaggaaggtcacaggtccaaactcagtctcagggcgctggcgtcaagtgtgggctgtgctggctcctcctggaggcccttggggaatctgtctcctgcctttcccagcgtctgcactctgcccacactgcttggctcgtgcccctccttggtcttccggggcagcaatgccgcatcttcgaatctctctctgactctctgactctggtccctgctctgtcgtcacagcttctcctccggctcctccaaagacccctgtgacttcgtcaggtccaccctcttacttgggatcatctccccactcaaggcctgtccctcaatgcacctgcaatgtcccatttgccctgtaaggtgacacagtcacaggttctggggattggggtgagaatgtctttggggtcatttttctgctgaccatcccagagttcacaaagacgctgagtgagtgaccctcctgagcctcagtttccctcccataacctggggtgttctgatggctgattgggctggtgccctggggaggtgtcttggccactgttgcccctactcctcctcctctttggacaccttaggggagtcggtggccctgccttgaagcagactggccccttgcggccactcgtaggagggcaagctcgggcttgaggtgcttcgagacagtgggagtctgctcgtcccacccgcagggccctgtccttttccgctgttgcgacacaccagagagcatccccctcgtccctcgttccctcacccccctggtctcagcatgcgccttctgtgttttgggccgggcttccttctcacacacatcccctcactcactttgaagcaggtgacgcctcccctgtcctgaaccacgcggccgtccctttgatttccaacaagatctgcaaccacagggacgtgtacggtggcatcatctccccctccatgctctgcgcgggctacctgacgggtggcgtggacagctgccaggtacggggccgcagcggtgggcgaggccgtggcagggtgacccagcccttgggacaggtcgttgccagcgtttccctgtgacaggacaaaaagtaaatttacagggcgtggagaagaaatttgctcaagatatcactccttttcctggctgccagccctgtgtttacccagtgatctggctctgcgtgggtgctgggtggtgggaggggactcatgctgctcccctccaattctgactttgtgggggaccacaggggaggcaggtggtggggaggcaggtggcggggaaccagtgaatctggccctccgaaagctgcagtggctgggactccagttctactaggtggatcacaggtcacctgagggccctggccaggtggaccctccctctcaccagctgcccttgagcttcagagggtcagggtctgcattctggaagggacacacagctggaggcagcaccccaaaggggccgagggacatcctcccttggggatgctgtgtctggaagggctggtgggttcccttctgtaacctgggtcatccattgggacatcatgaaggggggtcccaactccatagcaagcagcctcacacggcagactgtccacagaaagcaatctcgcatggcggtgactgtcccccaatctttgcttctttcctgtcacccagggggacagcggggggcccctggtgtgtcaagagaggaggctgtggaagttagtgggagcgaccagctttggcatcggctgcgcagaggtgaacaagcctggggtgtacacccgtgtcacctccttcctggactggatccacgagcagatggaggtgggtgcggcgccctccccagctcacgttgtccctggcttttgaccctaaggtcccttaaatgcaaccctggtcttgctataaaaaccagggcgtgacccagtggttgtcaattcagcagcagtgacttggtggctccagggtgtcagacgcttgtgctgaaaacagagatcacagctagtcctgggcagctctgggtgggtgcagcctggcaggcagaggagctggggcccgggaggaagaaggagcctcacgacatgggaaaggaggaggcagcgaggaggagcccctgctgggatggggatgggtcgggcgtgccccgtgtgccaggagcagggagaaagtgggagggggcggggggctgagacagtgcgggagaggaccttgcctgcctgctgaggggctggaacctcgctgggagccagggatgagaggcagcagtcaggagaggcttggggagctctgcattggtggtgtgggggggtggggggtcccggagggggaggcgtggaagtgggaggggcctgcaggggggcacccaacagcgaggctggcttggcaggacccgggcatggaggggaaacctgagacggtggaggaggaagaaggaggcttagggcttcgctgggaccctggcagctgcgtgctggcaggtgaacacggcgcctttctcatgtgggcgccggggaaacatttgctggcttgatctcagatgaagtctctccttgggatggtttcaaacacaggaggtcctcacttaatacggttgatgggatcttagaaactgcagctttaggagaaacagtgcgcacaggccctccagcaacgtccttgcttgcaatgtaattttgttataaagtcgatgagaaaaaaaaaattggtttcattatatatcattttgcttaaagtcgtagtttccaagaactaacaatgacgtcaaagtaagtacgttttttttccctaattcaagtgaaatttatataacatacaattcaccattttaaagtgaacaaccctgtagcatcagcacattcacagggctgtgcagacaccacctttgtcagttcccagcattctcatctcccaaaagacacgcggcaccctagaagcacgcagttactccccactccacttttctccccagcctctggcacccaccagtcagctttctgtctccaaggctcaaagacctttttaaaaagctcatttaatttgaaacaattggccaagaaaggacatcaaatgctgaatgtgcctcaggcgttaattcccgttttgctctcactgattttgtgctttaaatgagaaactaaagaatggtgcccacgggcacagggtgaggcctgggactgagacctgggctagcttcacctccagcactgccgccctgcagccctgagcaccccctcggggcgtggtgagggctgtgctcgggctgggtggaaagtgcttgctcctgctcaccttgctgggagaggcagcctggccccatactaggcactgagtggcctgctatgctcttcagtataaagctcagcccagcccgcccgcactgtagaaaggaccaggatggacaactgaatgggagacctcctcactgttcagggtgctgtgggagcctggggggcacagaagggtcgcgtgggcacagagggcaaagggcaggaaaggagaagccggtcctccacacgggtctgcagtacatggaggccttcacgggacacagatccccaggggctgagcactgagctggtgatcctaaaagtcccccttaagacactgaaggcgcaaggcagagaagcccaccgccgtgtcttccagctgtcgtgggtgagctggagacaaacgttcaaaatcagtctggggagcccgctcacaacggttccatgacggggccacctcagcccctcccatgtcagcaccgtcctgggccacagagcctgtgaccctccctgtactacagcggagacgacctgcatgaggcccccccagctaacaagggcagagtgtgcctcacatcagatccccgacgtggccccagtgtgactgcacagcagaatcaacagatctcaaacttaggggtgcagaagcctctctcaggatgtttgttaaatgtgaagattgcagggcgtttatctggagtctgattgggaggtctggggtgaagaccctggtgaatgtgttgcatgggggcttcagggcacactgagaaaccctgggagggtcttggaggcagtttcccctgttgtggtgaagctgtggtggaggagctcgtctgtgacgctggctccggcgatgcctggggcccctgctccctgcacaacgccttagtcatccgctgcctccaacccaccagtgcatgcgagagatgcgcagcctcagacacgccctttcccaagtccctcttcagacgtcctaggggagacccagaagagacttcctttcctgggaggctttccagcaggcccgctgtgcgtttcagttgtccattgtgaggaaagtcaacgtgagggcctttggaagactcactgtcttgcggggaagtgtcccgtgtgctagttggtggcatgcccatggcctcatcttcattttcatccagcacttttctctatctagttgggggtttaaaacaaaattgttgtgactcaaaccagaactcaggaacatagtgccgagacctggaagtttcctacggaagtgacggaactgtcgcagggcggagatgggacctgcggatgcattgctggttggagcttttcatgcctgcctgggatccactcagagctggcagccccagggggaggccaaccttgtcttcatcgtggagaacagccccacaattcccacagggcaaaatgcaggtgcccgctccgtcatcatgttggacggatggctggaagtgctaaaaacaataacgcctttgttttcatttatagagagacctaaaaacctgaagaggaaggggacaagtagccacctgagttcctgaggtgatgaagacagcccgatcctcccctggactcccgtgtaggaacctgcacacgagcagacacccttggagctctgagttccggcaccagtagcaggcccgaaagaggcacccttccatctgattccagcacaaccttcaagctgctttttgttttttgtttttttgagatggagtctcgctctgttgcccaggctggagtgcagtggcgaaatccctgctcactgcagcctccgcttccctggttcaagcgattctcttgcctcagcttccccagtagctgggaccacaggtgcccgccaccacacccaactaatttttgtatttttagtagagacagggtttcaccatgttggccaggctgctctcaaacccctgacctcaaatgatgtgcctgcttcagcctcccacagtgctgggattacaggcatgggccaccacgcctagcctcacgctcctttctgatcttcactaagaacaaaagaagcagcaacttgcaagggcggcctttcccactggtccatctggttttctctccaggggtcttgcaaaattcctgacgagataagcagttatgtgacctcacgtgcaaagccaccaacagccactcagaaaagacgcaccagcccagaagtgcagaactgcagtcactgcacgttttcatctctagggaccagaaccaaacccaccctttctacttccaagacttattttcacatgtggggaggttaatctaggaatgactcgtttaaggcctattttcatgatttctttgtagcatttggtgcttgacgtattattgtcctttgattccaaataatatgtttccttccctcattg

SEQ ID NO: 310 - DNA, 674 bp, Homo sapiens
tcaacatcctgtcctcggctggacatggtggctcacgcttgtaatcccagtactttggagagccaagtggggagaatcacttgagcccaggagtttgacatcagcctgagcaacatagtgagatccccatctctataagaaaaaatttaaacaaacaaacaaaaatcaacatcttgtccttgcatctcctctgggagatctcagcactacctctgcctgcaagccccccgtgtgggtttcaccccctcctctgcagggaaacagccttggaagttgggatgctacttcccctccatcttagtgtcatagggctgctgaaacaaagtccccaaaactgggtgacttaaaacaacaggaatttattgtctcagttctggaggccagaagtctgaattccaaggtgtcatcaaggccatactccctcttaaacccatagggcaccgtgccctgcctcttcctagctcctggtggtttgccaataatctttggcatttcttggtgtgtagatgcattgttcccatctctgccttcatcttcatgaggctggcttctgcctgtgtctcctcccatcctcttcccttcatgcatgtttgtccctgtgtcctgatttctcctttttgtttttgtgttttggagacggagttttgctcttgttgcccaggctggagtgtagc

SEQ ID NO: 311 - DNA, 674 bp, Homo sapiens; identical to SEQ ID NO: 310
